(19) United States
(12) Patent Application Publication
(10) Pub. No.: US 2018/0112011 A1
(43) Pub. Date: Apr. 26, 2018

(54) T CELL RETARGETING HETERO-DIMERIC IMMUNOGLOBULINS

(71) Applicant: GLENMARK PHARMACEUTICALS S.A., La Chaux-de-Fonds (CH)

(72) Inventor: Romain OLLIER, La Chaux-de-Fonds (CH)

(73) Assignee: GLENMARK PHARMACEUTICALS S.A., La Chaux-de-Fonds (CH)

(21) Appl. No.: 15/524,482

(22) PCT Filed: May 6, 2015
(86) PCT No.: PCT/EP2015/060003

§ 371 Date: May 4, 2017

Related U.S. Application Data
(63) Continuation of application No. 14/532,923, filed on Nov. 4, 2014, now Pat. No. 9,493,563.

(30) Foreign Application Priority Data
Nov. 4, 2013 (EP) 13191386.5
Nov. 4, 2014 (EP) PCT/EP2014/073738

(51) Int. Cl. C07K 16/46; C07K 16/28; C07K 16/42; C07K 16/32

(52) U.S. Cl. CPC C07K 16/468; C07K 2317/55; C07K 2317/565; C07K 16/2887; C07K 16/2863; C07K 16/2878; C07K 16/2809; C07K 2317/567; C07K 2317/94; C07K 2317/92; C07K 2317/71; C07K 2317/622; C07K 2317/33; C07K 2317/52; C07K 2317/24; C07K 16/4291; C07K 16/32; C07K 16/2896; C07K 2317/73; C07K 2317/14; C07K 16/2803; C07K 2317/31

(57) ABSTRACT

The present invention describes novel hetero-dimeric immunoglobulins or fragments thereof which bind to CD3 and a disease associated antigen. These hetero-dimeric immunoglobulins have been engineered to promote hetero-dimer formation during expression and can be purified to a high degree using a Protein A differential purification technique.

### FIELD OF THE INVENTION

[0001] The present invention relates to hetero-dimeric immunoglobulins that target both a component of the human CD3 antigen and a disease associated antigen and methods of making the same.

### BACKGROUND OF THE INVENTION

[0002] T cell redirected killing is a desirable mode of action in many therapeutic areas. Various bispecific antibody formats have been shown to mediate T cell redirection both in pre-clinical and clinical investigations (May C et al., (2012) Biochem Pharmacol, 84(9): 1105-12; Frankel S R & Baeuerle P A, (2013) Curr Opin Chem Biol, 17(3): 385-92). All T cell retargeting bispecific antibodies or fragments thereof are engineered to have at least two antigen binding sites wherein one site binds a surface antigen on a target cell and the other site binds a T cell surface antigen. Amongst T cell surface antigens, the human CD3 epsilon subunit from the TCR protein complex has been the most targeted to redirect T cell killing.

[0003] Many bispecific antibody formats have been used to redirect T cell killing, these mainly include tandem of scFv fragments and diabody based formats with only few examples of Fc-based bispecific antibody formats reported (Moore P A et al., (2011) Blood, 117(17): 4542-51; May C et al., (2012) supra; Frankel S R & Baeuerle P A, (2013) supra). Bispecific formats that will encompass a human Fc region will have longer circulation half-lives which may result in enhanced efficacy and/or less frequent dosing regimens. Among possible Fc-based bispecific formats, one preferred format to redirect T cell killing is the so-called heavy chain hetero-dimer format. This format is of particular interest as it does not allows aggregation of multiple copies of human CD3 molecules at the T cell surface thereby preventing any T cell inactivation (Klein C et al., (2012) MAbs, 4(6): 653-63).

[0004] The first described method to engineer heavy chain hetero-dimers is a method known as the “knob-into-hole” method (PCT Publication No: WO199627011; Merchant A M et al., (1998) Nat Biotechnol, 16(7): 677-81). Recently a chemical method known as the FAB-arm exchange method wherein two antibodies are combined into one bispecific antibody via reduction and in vitro reshuffling of half-immunoglobulins has been reported (PCT Publication Nos: WO2008119353 (Schuurman J et al.) and WO2013060867 (Gramer M et al.); Labrijn A F et al., (2013) Proc Natl Acad Sci USA, 110(13): 5145-50).

[0005] Both methods and derivatives thereof are currently inadequate to produce Fc-based bispecific antibody formats in mammalian cell hosts. When expressing “knob-into-hole” heavy chain hetero-dimers in mammalian cell hosts, bispecific antibody recovery is impaired by the presence of homo-dimers (Jackman J et al., (2010) J Biol Chem, 285(27): 20850-9; Klein C et al., supra). The FAB-arm exchange method and derivatives thereof suffers from the same drawback with the added problem of having first to produce the two “monospecific” antibodies separately.

[0006] When developing bispecific antibodies that redirect T cell killing via the engagement of a CD3 subunit, it is essential that no homo-dimers specific for the CD3 subunit are present in the final drug product. In the case of targeting the CD3 epsilon subunit, traces of anti-human CD3 epsilon antibody species (monospecific and bivalent for the human CD3 epsilon antigen) may trigger transient T cell activation and cytokine release before leading to T cell apoptosis thereby interfering with the goal of a controlled and specific T cell activation. Production of stable and safe Fc-based bispecific antibodies that efficiently redirect T cell killing remains a challenge to the pharmaceutical industry with respect to purity and yields. Accordingly there remains a need for a technology to efficiently produce anti-human CD3 based heavy chain hetero-dimers free of anti-human CD3 homo-dimers wherein the secreted bispecific antibody product is readily isolated from the cell culture supernatant from a recombinant mammalian host cell line.

[0007] Techniques to purify heavy chain hetero-dimers over homo-dimers based on a differential affinity for a reagent have been described. The first example of known differential affinity purification technique involved the use of two different heavy chains from two different animal species, wherein one of which does not bind the affinity reagent Protein A (Lindhofer H et al., (1995) J Immunol, 155(1): 219-225). The same authors also described the use of two different heavy chains originating from two different human immunoglobulin isotypes (IGHG1 and IGHG3), one of which does not bind the affinity reagent Protein A (IGHG3; see U.S. Pat. No. 6,551,592 Lindhofer H et al.). More recently, a variation of this technique was reported by Davis S et al. (PCT Publication No: WO2010151792) and made use of the two amino acid substitutions H435R and Y436F described by Jendeberg (1997) (Jendeberg L. et al. (1997) J Immunol Methods, 201(1): 25-34) to abrogate the affinity for the reagent Protein A in one of the hetero-dimer heavy chains.

[0008] The preferred known differential Protein A affinity purification technique of the present invention corresponds to a technique wherein all three species i.e. the two homo-dimeric species and the hetero-dimer of interest differ in their total number of Protein A binding sites by at least one site and wherein one of the two homo-dimeric species has no Protein A binding site and therefore does not bind Protein A (as shown in FIG. 1).

[0009] Drug stability is an important aspect of successful pharmaceutical development and VH3 based immunoglobulins or fragments thereof are of major importance to the biological drug industry. Therapeutic antibodies based on the VH3 subclass have been extensively developed as these frameworks bind Protein A and facilitate the testing of antibody fragments before their formatting into immunoglobulins; for example, many synthetic antibody phage display libraries used for antibody discovery are based on the VH3 subclass. In addition VH3 based antibodies are often selected for their good expression and stability over other known heavy chain variable domain subclasses.

[0010] Although a VH3 domain has only one Protein A binding site with a weaker affinity when compared to a Fc region which has two sites with a stronger affinity (Roben P W et al., (1995) J Immunol, 154(12): 6437-45), there is enough affinity to interfere with the known differential Protein A affinity purification techniques. When dealing with the purification of hetero-dimers of heavy chains wherein the heavy chain engineered in its Fc region to have no binding for Protein A encompasses one VH3 based antigen binding site, then Protein A binding is restored via the VH3 domain and the preferred technology described in FIG. 1 and above is no longer useful (FIG. 2A). In this instance, abrogating Protein A binding in the VH3 based antigen binding site provides a straightforward solution and allows to keep the initial architecture of the desired hetero-dimer (FIG. 2B). Alternatively, the heavy chain hetero-dimer can be re-engineered to have the VH3 based antigen binding site located on the heavy chain that binds Protein A in its Fc region (FIG. 2C; note that a VH3 domain has a weaker affinity for Protein A compared to a Fc monomer hence the hetero-dimer of interest still elutes at a separate pH value from the other homo-dimeric species, typically at pH 4, while the homo-dimeric species that binds Protein A now encompasses two additional Protein A binding sites and elutes at a pH value ≤3).

[0011] More importantly, when dealing with the purification of hetero-dimers of heavy chains wherein both heavy chains encompass a VH3 based antigen binding site, then the relocation strategy described above may only be partially helpful (FIG. 2D and FIG. 15B). Protein A based differential purification is only enabled when Protein A binding in at least one (FIG. 2E) or both (FIG. 2F) VH3 based antigen binding sites is abrogated.

[0012] Accordingly, there remains a need to abrogate Protein A binding within VH3 domains when undertaking the production of hetero-dimers of heavy chains encompassing this variable domain subclass.

### SUMMARY OF THE INVENTION

[0013] The present invention provides new anti-human CD3 bispecific antibodies comprising a second binding arm which can recognise and bind to a disease associated antigen.

[0014] In the context of the present invention a disease associated antigen means any antigen or epitope associated with a pathological state such as an oncogenic marker or a marker of some other metabolic or immunological dysfunction. In addition a disease marker my also relate to an infectious disease such as a pathogenic virus or bacteria.

[0015] In accordance with the present invention the target binding portion of the anti-human CD3 binding arm comprises a single chain variable fragment (scFv) of SP34. The scFv in particular has a better expression profile in comparison to a scFv-Fc comprising the heavy and light variable regions encoded by SEQ ID NOs: 60 and 61, whilst maintaining its CD3 binding properties.

[0016] In particular when expressed as a scFv-Fc it has at least a twofold improvement in expression in comparison to a SP34 chimera formatted as a scFv-Fc comprising the heavy and light variable regions encoded by SEQ ID NOs: 60 and 61. Preferably the improved SP34 scFv has at least a sixfold improvement in expression in comparison to a SP34 chimera formatted as an scFv comprising the heavy and light variable regions encoded by SEQ ID NOs: 60 and 61 and most preferably a twelvefold improvement in expression in comparison to a SP34 chimera formatted as an scFv comprising the heavy and light variable regions encoded by SEQ ID NOs: 60 and 61.

[0017] In accordance with another aspect of the present invention when expressed as a scFv in a bispecific antibody comprising a FAB arm in the BEAT format, it has at least a twofold improvement in expression in comparison to a SP34 chimera formatted as an scFv comprising the heavy and light variable regions encoded by SEQ ID NOs: 60 and 61. Preferably the improved SP34 scFv as a component of a BEAT bispecific antibody has at least a fivefold improvement in expression in comparison to a SP34 chimera formatted as an scFv, comprising the heavy and light variable regions encoded by SEQ ID NOs: 60 and 61, as a component of a BEAT bispecific antibody.

[0018] In accordance with the present invention the two binding arms of the anti-human CD3 bispecific antibody each comprise an immunoglobulin constant region and wherein the first arm or polypeptide binds to protein A and the second arm or polypeptide does not bind to protein A.

[0019] According to the present invention the binding of the first polypeptide to protein A and the lack of binding of the second polypeptide to protein A, is not intended to mean that the second polypeptide may not have some residual binding to protein A and it is instead intended that the second polypeptide binds less well to protein A in comparison to the first arm.

[0020] According to the present invention the first and second polypeptides of the hetero-dimeric immunoglobulin or fragment thereof, comprise an engineered immunoglobulin constant region with a modified CH3 region having a protein-protein interface that favours hetero-dimer formation over homo-dimer formation. In a preferred embodiment, the present invention provides a hetero-dimeric immunoglobulin or fragment thereof wherein the first and second polypeptides comprise an engineered immunoglobulin constant region with a modified CH3 domain having a protein-protein interface, wherein the protein-protein interface of the first polypeptide comprises an amino acid substitution at a position selected from the group consisting of: 3, 5, 7, 20, 22, 26, 27, 79, 81, 84, 84.2, 85.1, 86, 88 and 90 (IMGT® numbering), and wherein the protein-protein interface of the second polypeptide comprises an amino acid substitution at a position selected from the group consisting of: 3, 5, 7, 20, 22, 26, 27, 79, 81, 84, 84.2, 84.4, 85.1, 86, 88 and 90 (IMGT® numbering).

[0021] Preferably wherein the protein-protein interface of the second polypeptide comprises an amino acid substitution at position 84.4 and at least one further substitution at a position selected from the group consisting of: 3, 5, 7, 20, 22, 26, 27, 79, 81, 84, 84.2, 85.1, 86, 88 and 90 (IMGT® numbering).

[0022] In a further embodiment, the present invention provides a hetero-dimeric immunoglobulin or fragment thereof, wherein the first and second polypeptides comprise an engineered immunoglobulin constant region with a modified CH3 domain having a protein-protein interface, wherein the protein-protein interface of the first polypeptide comprises an amino acid substitution at position 88 and at a position selected from the group consisting of: 3, 5, 7, 20, 22, 26, 27, 79, 81, 84, 84.2, 85.1, 86 and 90 (IMGT® numbering), and wherein the protein-protein interface of the second polypeptide comprises an amino acid substitution at position 85.1 and/or 86 and at a position selected from the group consisting of 3, 5, 7, 20, 22, 26, 27, 79, 81, 84, 84.2, 84.4, 88 and 90 (IMGT® numbering).

[0023] According to a further aspect of the present invention the epitope binding region of the first polypeptide binds the CD3 protein complex and the epitope binding region of the second polypeptide binds a disease associated antigen or wherein the epitope binding region of the first polypeptide binds a disease associated antigen and the epitope binding region of the second polypeptide binds the CD3 protein complex; and wherein the epitope binding region that binds the CD3 protein complex comprises a heavy chain CDR1 comprising the amino acid sequence of SEQ ID NO: 200, a heavy chain CDR2 comprising the amino acid sequence of SEQ ID NO: 201 and a heavy chain CDR3 comprising the amino acid sequence of SEQ ID NO: 202, and a light chain CDR1 comprising the amino acid sequence of SEQ ID NO: 203, a light chain CDR2 comprising the amino acid sequence of SEQ ID NO: 204 and a light chain CDR3 comprising the amino acid sequences of: SEQ ID NO: 205; or wherein the epitope binding region that binds the CD3 protein complex comprises a heavy chain CDR1 comprising the amino acid sequence of SEQ ID NO: 352, a heavy chain CDR2 comprising the amino acid sequence of SEQ ID NO: 353 and a heavy chain CDR3 comprising the amino acid sequence of SEQ ID NO: 354, and a light chain CDR1 comprising the amino acid sequence of SEQ ID NO: 355, a light chain CDR2 comprising the amino acid sequence of SEQ ID NO: 356 and a light chain CDR3 comprising the amino acid sequences of SEQ ID NO: 357.

[0024] Use of these new anti-human CD3 bispecific antibodies is not limited to but includes treatments of various human cancers and autoimmune and inflammatory diseases. The specific destruction of cancer cells over healthy cells and tissues represents a primary objective in oncology. Therapeutics that could safely redirect T cell killing against tumour associated cell surface antigens may offer improved clinical efficacy. Known areas of clinical unmet needs in oncology include but are not limited to breast cancer, metastatic breast cancer, ovarian cancer, pancreatic cancer, lung cancer, lymphomas and multiple myeloma. Elimination of disease-causing T cells could be more beneficial than inhibiting T cell differentiation in treating autoimmune and inflammatory diseases such as psoriasis, multiple sclerosis and diabetes.

[0025] A preferred set of disease associated antigens come from the gene products CCR3, CCR6, CRTH2, PDL1, BLUT1, PirB, CD33, TROP2, CD105, GD2, GD3, CEA, VEGFR1, VEGFR2, NCAM, CD133, CD123, ADAM17, MCSP, PSCA, FOLR1, CD19, CD20, CD38, EpCAM, HER2, EGFR, PSMA, IgE, Integrin a4b1, CCR5, LewisY, FAP, MUC-1, Wue-1, MSP, EGFRvIII, P glycoprotein, AFP, ALK, BAGE proteins, CD30, CD40, CTLA4, ErbB3, ErbB4, Mesothelin, OX40, CA125, CAIX, CD66e, cMet, EphA2, HGF/SF, MUC1, Phosphatidylserine, TAG-72, TPBG, β-catenin, brc-abl, BRCA1, BORIS, CA9, caspase-8, CDK4, Cyclin-B1, CYP1B1, ETV6-AML, Fra-1, FOLR1, GAGE-1, GAGE-2, GloboH, glypican-3, GM3, gp100, HLA/B-raf, HLA/k-ras, HLA/MAGE-A3, hTERT, LMP2, MAGE1, MAGE2, MAGE3, MAGE4, MAGE6, MAGE12, MART-1, ML-IAP, Muc2, Muc3, Muc4, Muc5, Muc16, MUM1, NA17, NY-BR1, NY-BR62, NY-BR-85, NY-ESO1, p15, p53, PAP, PAX3 PAXS, PCTA-1, PLAC1, PRLR, PRAME, RAGE proteins, Ras, RGS5, Rho, SART-1, SART-3, Steap-1, Steap-2, survivin, TAG-72, TGF-β, TMPRSS2, Tn, TRP-1, TRP-2, tyrosinase, uroplakin-3.

[0026] A hetero-dimeric immunoglobulin or fragment thereof according to the invention, wherein the epitope binding region that binds a disease associated antigen comprises heavy chain CDR1, CDR2 and CDR3 amino acid sequences and light chain CDR1, CDR2 and CDR3 amino acid sequences, respectively, selected from the group consisting of:

### i) SEQ ID NOs: 206-211;

### ii) SEQ ID NOs: 212-217;

[0027] iii) SEQ ID NOs: 218-223;

### iv) SEQ ID NOs: 224-229;

### v) SEQ ID NOs: 230-235;

### vi) SEQ ID NOs: 236-241;

[0028] vii) SEQ ID NOs: 242-247;
viii) SEQ ID NOs: 248-253;

### ix) SEQ ID NOs: 254-259;

### x) SEQ ID NOs: 260-265;

### xi) SEQ ID NOs: 266-271; and

[0029] xii) SEQ ID NOs: 272-277;

[0030] In accordance with a further aspect of the present invention the constant region of the second polypeptide of the hetero-dimeric immunoglobulin or fragment thereof, comprises an IgG3 CH3 region.

[0031] In accordance with a further aspect of the present invention the constant region of the second polypeptide of the hetero-dimeric immunoglobulin or fragment thereof, comprises a CH3 region other than that from IgG, and the non-IgG3 CH3 region comprises at least one substitution so as to decrease/abolish protein A binding.

[0032] According to a further aspect of the present invention the epitope binding region of second polypeptide of the hetero-dimeric immunoglobulin or fragment thereof comprises a VH3 region comprising at least one modification that reduces protein A binding.

[0033] The inventors have shown that VH3 based antigen binding sites can be readily produced and purified with a high degree of purity in a single Protein A chromatography step. These antibodies may exhibit higher efficacy over current therapies in addition to their ease of production.

[0034] The present invention also provides a method to produce anti-human CD3 bispecific heavy chain hetero-dimers having at least one VH3 based antigen binding site from a recombinant mammalian host cell line wherein the bispecific antibody product is readily isolated after a single Protein A chromatography step with a high degree of purity.

[0035] In particular the modified VH3 region comprises an amino acid substitution selected from the group consisting of: 57, 65, 81, 82a and combination 19/57/59 (Kabat numbering) and even more preferably wherein the modified VH3 region comprises an amino acid substitution selected from the group consisting of: 57A, 57E, 65S, 81E, 82aS and combination 19G/57A/59A (Kabat numbering).

[0036] According to a further aspect of the present invention the hetero-dimeric immunoglobulin or fragment thereof, may comprise further substitutions wherein the heavy chain variable framework region comprises an amino acid substitution selected from the group consisting of: I34M, V48I, A49G, R58N/Y, I69L, A71T and T73K (Kabat numbering) and the light chain variable framework region comprises an amino acid substitution selected from the group consisting of: M4L, V33M, A34N, L46R, L47W, T51A, R66G, F71Y and P96F (Kabat numbering); or wherein the heavy chain variable framework region comprises the amino acid substitutions I34M, A49G and A71T (Kabat numbering) and the light chain variable framework region comprises the amino acid substitutions M4L, L46R, L47W and F71Y (Kabat numbering).

[0037] In a further embodiment, the epitope binding region that binds to the CD3 protein complex comprises a heavy chain variable framework region that is the product of or derived from the human VH3 subclass. Preferably the heavy chain variable framework region is the product of or derived from human IGHV3-23. More preferably, the heavy chain variable framework region is the product of or derived from human IGHV3-23*04 (SEQ ID NO: 22). The heavy chain variable framework region comprises at least one amino acid modification from the corresponding framework region of the heavy chain variable region of the corresponding murine antibody comprising the amino acid sequence of SEQ ID NO: 18 or SEQ ID NO: 60.

[0038] In a preferred embodiment, the epitope binding region of the first polypeptide that binds to the CD3 protein complex comprises a light chain variable framework region that is the product of or derived from the human VK1 subclass or the human VK3 subclass. Preferably the light chain variable framework region is the product of or derived from human VK1-39 or VK3-20. More preferably the light chain variable framework region is the product of or derived from human IGKV1-39*01 (SEQ ID NO: 23) or IGKV3-20*01 (SEQ ID NO: 24). The light chain variable framework region comprises at least one amino acid modification from the corresponding framework region of the light chain variable region of the corresponding murine antibody comprising the amino acid sequence of SEQ ID NO: 19 or SEQ ID NO: 61.

[0039] In a preferred embodiment, the epitope binding region that binds to the CD3 protein complex comprises a humanized heavy chain variable domain having the back mutations selected from the group consisting of: I34M, V48I, A49G, R58N/Y, I69L, A71T and T73K (Kabat numbering) and a humanized light chain variable domain having the back mutations selected from the group consisting of: M4L, V33M, A34N, L46R, L47W, R66G, F71Y and P96F (Kabat numbering). More preferably, the epitope binding region that binds to the CD3 protein complex comprises a humanized heavy chain variable domain having the back mutations I34M, A49G and A71T (Kabat numbering) and a humanized light chain variable domain having the back mutations M4L, L46R, L47W and F71Y (Kabat numbering).

[0040] According to a further aspect of the present invention the epitope binding region that binds the CD3 protein complex of the hetero-dimeric immunoglobulin or fragment thereof, wherein the epitope binding region that binds the CD3 protein complex comprises a heavy chain variable region comprising the amino acid sequence of SEQ ID NO: 101, and a light chain variable region comprising the amino acid sequence of SEQ ID NO: 105; or wherein the epitope binding region that binds the CD3 protein complex comprises a heavy chain variable region comprising the amino acid sequence of SEQ ID NO: 103, and a light chain variable region comprising the amino acid sequence of SEQ ID NO: 106; or wherein the epitope binding region that binds the CD3 protein complex comprises a heavy chain variable region comprising the amino acid sequence of SEQ ID NO: 104, and a light chain variable region comprising the amino acid sequence of SEQ ID NO: 106; or wherein the epitope binding region that binds the CD3 protein complex comprises a heavy chain variable region comprising the amino acid sequence of SEQ ID NO: 104, and a light chain variable region comprising the amino acid sequence of SEQ ID NO: 401; or wherein the epitope binding region that binds the CD3 protein complex comprises a heavy chain variable region comprising the amino acid sequence of SEQ ID NO: 104, and a light chain variable region comprising the amino acid sequence of SEQ ID NO: 402.

[0041] The CD3 protein complex comprises a number of subunits, for example, delta, epsilon and gamma. In a preferred embodiment, the epitope binding region that binds to the CD3 protein complex binds to the CD3 epsilon subunit.

[0042] An epitope binding region as described herein includes the combination of one or more heavy chain variable domains and one or more complementary light chain variable domains which together form a binding site which permits the specific binding of the hetero-dimeric immunoglobulin or fragment thereof to one or more epitopes. In an embodiment of the present invention, the epitope binding region of the first poly peptide comprises a FAB and the epitope binding region of the second polypeptide comprises a scFv. Alternatively, the epitope binding region of the first poly peptide comprises a scFv and the epitope binding region of the second polypeptide comprises a FAB.

[0043] In one embodiment, the epitope binding region that binds a disease associated antigen binds to HER2. The epitope binding region comprises a heavy chain variable framework region that is the product of or derived from the human VH3 subclass, preferably human VH3-23, more preferably human IGHV3-23*04 (SEQ ID NO: 22), and a light chain variable framework region that is the product of or derived from the human VK1 subclass, preferably human VK1-39, more preferably human IGKV1-39*01 (SEQ ID NO: 23).

[0044] In a preferred embodiment, the epitope binding region that binds the disease associated antigen HER2 comprises a heavy chain variable domain comprising the amino acid sequence of SEQ ID NO: 20 and a light chain variable domain comprising the amino acid sequence of SEQ ID NO: 21. In a further preferred embodiment, the epitope binding region that binds HER2 may comprise a heavy chain variable domain and a light chain variable domain joined by a G₄S linker forming a scFv fragment comprising the amino acid sequence of SEQ ID NO: 107. Preferably, the variable domain of the scFv fragment comprises a modification to abrogate binding to Protein A, wherein the amino acid substitution is 65S (Kabat numbering) and wherein the scFv fragment comprises the amino acid sequence of SEQ ID NO: 109 or wherein the amino acid substitution is 82aS (Kabat numbering) and wherein the scFv fragment comprises the amino acid sequence of SEQ ID NO: 111.

[0045] In particular wherein said Herceptin binding arm comprises a heavy chain variable region encoded by SEQ ID NO: 20 and a light chain variable region encoded by SEQ ID NO: 21.

[0046] In another embodiment, the epitope binding region that binds a disease associated antigen binds to CD38. The epitope binding region comprises a heavy chain variable framework region that is the product of or derived from the human VH3 subclass, preferably human VH3-23, more preferably human IGHV3-23*04 (SEQ ID NO: 22). The heavy chain variable framework region comprises at least one amino acid modification from the corresponding framework region of the heavy chain variable region of the corresponding murine antibody comprising the amino acid sequence of SEQ ID NO: 112 or 114 or 122. The epitope binding region further comprises a light chain variable framework region that is the product of or derived from the human VK1 subclass, preferably human VK1-39, more preferably human IGKV1-39*01 (SEQ ID NO: 23). The light chain variable framework region comprises at least one amino acid modification from the corresponding framework region of the light chain variable region of the corresponding murine antibody comprising the amino acid sequence of SEQ ID NO: 113 or 115 or 123.

[0047] In particular the CD38 binding polypeptide comprises variable heavy chain domain and variable light chain domain pair encoded by SEQ ID NOs: 116/117, 129/130, 133/134 and 135/136.

[0048] In one embodiment, the epitope binding region that binds a disease associated antigen binds to OX40. The epitope binding region comprises a heavy chain variable framework region that is the product of or derived from the human VH3 subclass, preferably human VH3-23, more preferably human IGHV3-23*04 (SEQ ID NO: 22). The heavy chain variable framework region comprises at least one amino acid modification from the corresponding framework region of the heavy chain variable region of the corresponding murine antibody comprising the amino acid sequence of SEQ ID NO: 139. The epitope binding region further comprises a light chain variable framework region that is the product of or derived from the human VK1 subclass, preferably human VK1-39, more preferably human IGKV1-39*01 (SEQ ID NO: 23). The light chain variable framework region comprises at least one amino acid modification from the corresponding framework region of the light chain variable region of the corresponding murine antibody comprising the amino acid sequence of SEQ ID NO: 140.

[0049] Most preferably, the humanized heavy chain variable domain comprises a modification to abrogate binding to Protein A comprising the substitution G65S or the substitution N82aS (Kabat numbering).

[0050] In particular the OX40 binding polypeptide comprises variable heavy chain domain and variable light chain domain pair encoded by SEQ ID NOs: 141/142, 278/280 and 279/281.

[0051] In one embodiment, the epitope binding region that binds a disease associated antigen binds to CD19. The epitope binding region comprises a heavy chain variable framework region that is the product of or derived from the human VH3 subclass, preferably human VH3-23, more preferably human IGHV3-23*04 (SEQ ID NO: 22) and most preferably comprises the amino acid sequence of SEQ ID NO: 296. The epitope binding region further comprises a light chain variable framework region that is the product of or derived from the human VK1 subclass, preferably human VK1-39, more preferably human IGKV1-39*01 (SEQ ID NO: 23) and most preferably comprises the amino acid sequence of SEQ ID NO: 297. In a preferred embodiment, the heavy chain variable domain comprises a modification to abrogate binding to Protein A comprising the substitution G65S or the substitution N82aS (Kabat numbering).

[0052] In particular the CD19 binding polypeptide comprises variable heavy chain domain and variable light chain domain pair encoded by SEQ ID NOs: 296/297.

[0053] In one embodiment, the epitope binding region that binds a disease associated antigen binds to CD20. The epitope binding region comprises a heavy chain variable framework region that is the product of or derived from the human VH3 subclass, preferably human VH3-23, more preferably human IGHV3-23*04 (SEQ ID NO: 22). The heavy chain variable framework region comprises at least one amino acid modification from the corresponding framework region of the heavy chain variable region of the corresponding murine antibody comprising the amino acid sequence of SEQ ID NO: 143. The epitope binding region further comprises a light chain variable framework region that is the product of or derived from the human VK1 subclass, preferably human VK1-39, more preferably human IGKV1-39*01 (SEQ ID NO: 23). The light chain variable framework region comprises at least one amino acid modification from the corresponding framework region of the light chain variable region of the corresponding murine antibody comprising the amino acid sequence of SEQ ID NO: 144.

[0054] Most preferably, the humanized heavy chain variable domain comprises a modification to abrogate binding to Protein A comprising the substitution G65S or the substitution N82aS (Kabat numbering).

[0055] In particular the CD20 binding polypeptide comprises variable heavy chain domain and variable light chain domain pair encoded by SEQ ID NOs: 143/144, 282/284, 283/285.

[0056] In one embodiment, the epitope binding region that binds a disease associated antigen binds to EGFR. The epitope binding region comprises a heavy chain variable framework region that is the product of or derived from the human VH3 subclass, preferably human VH3-23, more preferably human IGHV3-23*04 (SEQ ID NO: 22). The heavy chain variable framework region comprises at least one amino acid modification from the corresponding framework region of the heavy chain variable region of the corresponding murine antibody comprising the amino acid sequence of SEQ ID NO: 145. The epitope binding region further comprises a light chain variable framework region that is the product of or derived from the human VK1 subclass, preferably human VK1-39, more preferably human IGKV1-39*01 (SEQ ID NO: 23). The light chain variable framework region comprises at least one amino acid modification from the corresponding framework region of the light chain variable region of the corresponding murine antibody comprising the amino acid sequence of SEQ ID NO: 146.

[0057] Most preferably, the humanized heavy chain variable domain comprises a modification to abrogate binding to Protein A comprising the substitution G65S or the substitution N82aS (Kabat numbering).

[0058] In particular the EGFR binding polypeptide comprises variable heavy chain domain and variable light chain domain pair encoded by SEQ ID NOs: 145/146, 286/288, 287/289, 290/291, 292/294.

[0059] In one embodiment, the epitope binding region that binds a disease associated antigen binds to IgE. The epitope binding region comprises a heavy chain variable framework region that is the product of or derived from the human VH3 subclass, preferably human VH3-23, more preferably human IGHV3-23*04 (SEQ ID NO: 22). The heavy chain variable framework region comprises at least one amino acid modification from the corresponding framework region of the heavy chain variable region of the corresponding humanized antibody comprising the amino acid sequence of SEQ ID NO: 298 or the corresponding murine antibody comprising the amino acid sequence of SEQ ID NO: 304. The epitope binding region further comprises a light chain variable framework region that is the product of or derived from the human VK1 subclass, preferably human VK1-39, more preferably human IGKV1-39*01 (SEQ ID NO: 23). The light chain variable framework region comprises at least one amino acid modification from the corresponding framework region of the light chain variable region of the corresponding humanized antibody comprising the amino acid sequence of SEQ ID NO: 299 or the corresponding murine antibody comprising the amino acid sequence of SEQ ID NO: 305.

[0060] Most preferably, the heavy chain variable domain comprises a modification to abrogate binding to Protein A comprising the substitution G65S or the substitution N82aS (Kabat numbering).

[0061] In particular the IgE binding polypeptide comprises variable heavy chain domain and variable light chain domain pair encoded by SEQ ID NOs: 298/299, 300/302, 301/303, 304/305, 306/308, 307/309.

[0062] Anti-CD3 antibodies have been found to trigger toxicity by both direct and indirect mechanisms. Indirect mechanisms are mediated by the Fc region of the CD3 antibody which acts with the Fc receptor expressing immune cells and lead to transient T cell activation and cytokine release. Therefore in order to improve the safety of the hetero-dimeric immunoglobulins or fragment thereof as described herein, the immunoglobulin constant region of the first and/or second polypeptide has reduced or no binding for effector immune cells and/or complement C1q. Preferably, the immunoglobulin constant region is engineered to abrogate Fc receptor binding in the lower hinge region. More preferably the immunoglobulin constant region of the first and/or second polypeptide comprises the substitution(s) L234A and/or L235A (EU numbering). Most preferably, the immunoglobulin constant region of the first and/or second polypeptide comprises the substitutions L234A and L235A (EU numbering).

[0063] In another aspect, the disclosure of the present invention also describes a hetero-dimeric immunoglobulin or fragment thereof wherein the epitope binding region binds to the CD3 epsilon subunit of the CD3 protein complex and comprises a FAB having a FAB thermo-stability superior to the FAB thermo-stability of the SP34 chimera comprising a heavy chain variable domain of amino acid sequence of SEQ ID NO: 60 and a light chain variable domain of amino acid sequence of SEQ ID NO: 61, as measured by Differential Scanning calorimetry (DSC) as in Table 1. This increased thermostability will mean that these improved SP34 binding arms will have increased in vivo and in vitro stability, meaning better performance as a therapeutic and also in terms of its stability/storage/shelf life.

[0064] In accordance with a further aspect of the present invention there is provided a method to improve the expression of an scFv comprising the variable heavy and light domain sequences SEQ ID NO: 60 and 61 of SP34, including the steps:
[0065] a) Modifying at least one of the residues in the heavy or light variable domains encoded by SEQ ID NO: 60 and 61;
[0066] b) Expressing the expression of the modified construct from step a);
[0067] c) Comparing the expression level of the modified construct to an scFv comprising the heavy/light variable domains encoded SEQ ID NO: 60 and SEQ ID NO: 61 or SEQ ID NO: 62 and SEQ ID NO: 63 or SEQ ID NO: 64 and SEQ ID NO: 69;
[0068] d) Selecting the modified construct if it is more expressed than the an scFv comprising the heavy/light variable domains encoded SEQ ID NO: 60 and SEQ ID NO: 61 or SEQ ID NO: 62 and SEQ ID NO: 63 or SEQ ID NO: 64 and SEQ ID NO: 69.

[0069] In accordance with the present invention the heavy variable domain are modified at least at position 100e.

[0070] In particular residue 100e is substituted for an amino acid with a hydrophobic side chain and in particular for a phenylalanine or tyrosine residue.

[0071] In accordance with the present invention the light variable domain are modified at least at one of positions 29, 30, 91, 95.

[0072] In accordance with the present invention the residues are randomly mutated.

[0073] In accordance with the present invention the residues are mutated by site directed mutagenesis for all canonical amino acids and/or non-canonical amino acids or subsets thereof.

[0074] In accordance with a preferred aspect of the present invention the residues are mutated by site directed mutagenesis to other residues present in the same position in other characterised versions of the variable heavy and light domains.

[0075] In particular residue 29 is substituted for a alanine, glutamic acid or serine residue; residue 30 is substituted for a alanine or aspartic acid residue; residue 91 is substituted for a phenylalanine residue and residue 95 is substituted for a glycine or threonine residue.

[0076] In further aspect, the present invention provides a hetero-dimeric immunoglobulin or fragment thereof as described herein wherein one epitope binding region binds to the CD3 epsilon subunit of the CD3 protein complex and the other epitope binding region that binds a disease associated antigen, binds HER2. The potency of such a hetero-dimeric immunoglobulin or fragment thereof to redirect T-cell killing can be measured in an in vitro assay using a flow cytometry method (RDL-FACS) or a colorimetric based method (RDL-MTS) on cell lines expressing HER2 such as JIMT-1, BT-474 and MDA-MB-231, as described in the Examples.

[0077] In a preferred embodiment, the present invention provides hetero-dimeric immunoglobulin or fragment thereof binding to:

i) the CD3 protein complex and HER2, wherein the first polypeptide has an amino acid sequence selected from the group comprising SEQ ID NO: 359 and is assembled with a light chain of amino acid sequence of SEQ ID NO: 399 or 400 and binds CD3 epsilon, and wherein the second polypeptide has an amino acid sequence of SEQ ID NO: 167 and binds HER2;
ii) the CD3 protein complex and HER2, wherein the first polypeptide has an amino acid sequence selected from the group comprising SEQ ID NO: 359 and is assembled with a light chain of amino acid sequence of SEQ ID NO: 399 or 400 and binds CD3 epsilon, and wherein the second polypeptide has an amino acid sequence of SEQ ID NO: 167 and binds HER2;
iii) the CD3 protein complex and CD38, wherein the first polypeptide has an amino acid sequence selected from the group comprising SEQ ID NO: 359 and is assembled with a cognate light chain of amino acid sequence of SEQ ID NO: 399 or 400 and binds CD38, and wherein the second polypeptide has an amino acid sequence of SEQ ID NO: 162 and binds CD3 epsilon;
iv) the CD3 protein complex and CD38, wherein the first polypeptide has an amino acid sequence of SEQ ID NO: 170 and is assembled with a cognate light chain of amino acid sequence of SEQ ID NO: 138 and binds CD38, and wherein the second polypeptide has an amino acid sequence of SEQ ID NO: SEQ ID NO: 361, SEQ ID NO: 311, SEQ ID NO: 394 and SEQ ID NO: 396 and binds CD3 epsilon;
v) the CD3 protein complex and CD38, wherein the first polypeptide has an amino acid sequence of SEQ ID NO: 176 and is assembled with a cognate light chain of amino acid sequence of SEQ ID NO: 119 and binds CD38, and wherein the second polypeptide has an amino acid sequence of SEQ ID NO: SEQ ID NO: 361, SEQ ID NO: 311, SEQ ID NO: 394 and SEQ ID NO: 396 and binds CD3 epsilon;
vi) the CD3 protein complex and CD38, wherein the first polypeptide has an amino acid sequence of SEQ ID NO: 178 and is assembled with a cognate light chain of amino acid sequence of SEQ ID NO: 128 and binds CD38, and wherein the second polypeptide has an amino acid sequence of SEQ ID NO: SEQ ID NO: 361, SEQ ID NO: 311, SEQ ID NO: 394 and SEQ ID NO: 396 and binds CD3 epsilon;
vii) the CD3 protein complex and OX40 wherein the first polypeptide has an amino acid sequence selected from the group comprising SEQ ID NO: 359 and is assembled with a cognate light chain of amino acid sequence of SEQ ID NO: 399 or 400 and binds OX40, and wherein the second polypeptide has an amino acid sequence of SEQ ID NO: 162 and binds CD3 epsilon;
viii) the CD3 protein complex and EGFR wherein the first polypeptide has an amino acid sequence of SEQ ID NO: 174 and is assembled with a cognate light chain of amino acid sequence of SEQ ID NO: 175 and binds EGFR, and wherein the second polypeptide has an amino acid sequence of SEQ ID NO: SEQ ID NO: 361, SEQ ID NO: 311, SEQ ID NO: 394 and SEQ ID NO: 396 and binds CD3 epsilon;
ix) the CD3 protein complex and CD20, wherein the first polypeptide has an amino acid sequence of SEQ ID NO: 180 and is assembled with a cognate light chain of amino acid sequence of SEQ ID NO: 181 and binds CD20, and wherein the second polypeptide has an amino acid sequence of SEQ ID NO: SEQ ID NO: 361, SEQ ID NO: 311, SEQ ID NO: 394 and SEQ ID NO: 396 and binds CD3 epsilon.

[0078] In a further embodiment, the present invention provides hetero-dimeric immunoglobulin or fragment thereof binding to:

the CD3 protein complex and HER2, wherein the first polypeptide has an amino acid sequence of SEQ ID NO: 310 and is assembled with a light chain of amino acid sequence of SEQ ID NO: 3 and binds HER2, and wherein the second polypeptide has an amino acid sequence selected from the group comprising of SEQ ID NO: 361, SEQ ID NO: 311, SEQ ID NO: 394 and SEQ ID NO: 396 and binds CD3 epsilon;
the CD3 protein complex and CD38, wherein the first polypeptide has an amino acid sequence of SEQ ID NO: 312 or 404 and is assembled with a light chain of amino acid sequence of SEQ ID NO: 132 and binds CD38, and wherein the second polypeptide has an amino acid sequence selected from the group comprising of SEQ ID NO: 361, SEQ ID NO: 311, SEQ ID NO: 394 and SEQ ID NO: 396 and binds CD3 epsilon;
the CD3 protein complex and CD38, wherein the first polypeptide has an amino acid sequence of SEQ ID NO: 313 and is assembled with a light chain of amino acid sequence of SEQ ID NO: 138 and binds CD38, and wherein the second polypeptide has an amino acid sequence selected from the group comprising of SEQ ID NO: 361, SEQ ID NO: 311, SEQ ID NO: 394 and SEQ ID NO: 396 and binds CD3 epsilon;
the CD3 protein complex and OX40, wherein the first polypeptide has an amino acid sequence of SEQ ID NO: 314 and is assembled with a light chain of amino acid sequence of SEQ ID NO: 315 and binds OX40, and wherein the second polypeptide has an amino acid sequence selected from the group comprising of SEQ ID NO: 361, SEQ ID NO: 311, SEQ ID NO: 394 and SEQ ID NO: 396 and binds CD3 epsilon;
the CD3 protein complex and OX40, wherein the first polypeptide has an amino acid sequence of SEQ ID NO: 316 and is assembled with a light chain of amino acid sequence of SEQ ID NO: 317 and binds OX40, and wherein the second polypeptide has an amino acid sequence selected from the group comprising of SEQ ID NO: 361, SEQ ID NO: 311, SEQ ID NO: 394 and SEQ ID NO: 396 and binds CD3 epsilon;
the CD3 protein complex and CD20, wherein the first polypeptide has an amino acid sequence of SEQ ID NO: 318 and is assembled with a light chain of amino acid sequence of SEQ ID NO: 319 and binds CD20, and wherein the second polypeptide has an amino acid sequence selected from the group comprising of SEQ ID NO: 361, SEQ ID NO: 311, SEQ ID NO: 394 and SEQ ID NO: 396 and binds CD3 epsilon;
the CD3 protein complex and CD20, wherein the first polypeptide has an amino acid sequence of SEQ ID NO: 320 and is assembled with a light chain of amino acid sequence of SEQ ID NO: 321 and binds CD20, and wherein the second polypeptide has an amino acid sequence selected from the group comprising of SEQ ID NO: 361, SEQ ID NO: 311, SEQ ID NO: 394 and SEQ ID NO: 396 and binds CD3 epsilon;
the CD3 protein complex and EGFR, wherein the first polypeptide has an amino acid sequence of SEQ ID NO: 322 and is assembled with a light chain of amino acid sequence of SEQ ID NO: 323 and binds EGFR, and wherein the second polypeptide has an amino acid sequence selected from the group comprising of SEQ ID NO: 361, SEQ ID NO: 311, SEQ ID NO: 394 and SEQ ID NO: 396 and binds CD3 epsilon;
the CD3 protein complex and EGFR, wherein the first polypeptide has an amino acid sequence of SEQ ID NO: 324 and is assembled with a light chain of amino acid sequence of SEQ ID NO: 325 and binds EGFR, and wherein the second polypeptide has an amino acid sequence selected from the group comprising of SEQ ID NO: 361, SEQ ID NO: 311, SEQ ID NO: 394 and SEQ ID NO: 396 and binds CD3 epsilon;
the CD3 protein complex and EGFR, wherein the first polypeptide has an amino acid sequence of SEQ ID NO: 326 and is assembled with a light chain of amino acid sequence of SEQ ID NO: 327 and binds EGFR, and wherein the second polypeptide has an amino acid sequence selected from the group comprising of SEQ ID NO: 361, SEQ ID NO: 311, SEQ ID NO: 394 and SEQ ID NO: 396 and binds CD3 epsilon;
the CD3 protein complex and EGFR, wherein the first polypeptide has an amino acid sequence of SEQ ID NO: 328 and is assembled with a light chain of amino acid sequence of SEQ ID NO: 329 and binds EGFR, and wherein the second polypeptide has an amino acid sequence selected from the group comprising of SEQ ID NO: 361, SEQ ID NO: 311, SEQ ID NO: 394 and SEQ ID NO: 396 and binds CD3 epsilon;
the CD3 protein complex and CD19, wherein the first polypeptide has an amino acid sequence of SEQ ID NO: 330 and is assembled with a light chain of amino acid sequence of SEQ ID NO: 331 and binds CD19, and wherein the second polypeptide has an amino acid sequence selected from the group comprising of SEQ ID NO: 361, SEQ ID NO: 311, SEQ ID NO: 394 and SEQ ID NO: 396 and binds CD3 epsilon;
the CD3 protein complex and IgE, wherein the first polypeptide has an amino acid sequence of SEQ ID NO: 332 and is assembled with a light chain of amino acid sequence of SEQ ID NO: 333 and binds IgE, and wherein the second polypeptide has an amino acid sequence selected from the group comprising of SEQ ID NO: 361, SEQ ID NO: 311, SEQ ID NO: 394 and SEQ ID NO: 396 and binds CD3 epsilon;
the CD3 protein complex and IgE, wherein the first polypeptide has an amino acid sequence of SEQ ID NO: 334 and is assembled with a light chain of amino acid sequence of SEQ ID NO: 335 and binds IgE, and wherein the second polypeptide has an amino acid sequence selected from the group comprising of SEQ ID NO: 361, SEQ ID NO: 311, SEQ ID NO: 394 and SEQ ID NO: 396 and binds CD3 epsilon;
the CD3 protein complex and IgE, wherein the first polypeptide has an amino acid sequence of SEQ ID NO: 336 and is assembled with a light chain of amino acid sequence of SEQ ID NO: 337 and binds IgE, and wherein the second polypeptide has an amino acid sequence selected from the group comprising of SEQ ID NO: 361, SEQ ID NO: 311, SEQ ID NO: 394 and SEQ ID NO: 396 and binds CD3 epsilon;
the CD3 protein complex and IgE, wherein the first polypeptide has an amino acid sequence of SEQ ID NO: 338 and is assembled with a light chain of amino acid sequence of SEQ ID NO: 339 and binds IgE, and wherein the second polypeptide has an amino acid sequence selected from the group comprising of SEQ ID NO: 361, SEQ ID NO: 311, SEQ ID NO: 394 and SEQ ID NO: 396 and binds CD3 epsilon;
the CD3 protein complex and OX40, wherein the first polypeptide has an amino acid sequence of SEQ ID NO: 340 and is assembled with a light chain of amino acid sequence of SEQ ID NO: 173 and binds OX40, and wherein the second polypeptide has an amino acid sequence selected from the group comprising of SEQ ID NO: 361, SEQ ID NO: 311, SEQ ID NO: 394 and SEQ ID NO: 396 and binds CD3 epsilon;
the CD3 protein complex and CD20, wherein the first polypeptide has an amino acid sequence of SEQ ID NO: 341 and is assembled with a light chain of amino acid sequence of SEQ ID NO: 181 and binds CD20, and wherein the second polypeptide has an amino acid sequence selected from the group comprising of SEQ ID NO: 361, SEQ ID NO: 311, SEQ ID NO: 394 and SEQ ID NO: 396 and binds CD3 epsilon;
the CD3 protein complex and EGFR, wherein the first polypeptide has an amino acid sequence of SEQ ID NO: 342 and is assembled with a light chain of amino acid sequence of SEQ ID NO: 175 and binds EGFR, and wherein the second polypeptide has an amino acid sequence selected from the group comprising of SEQ ID NO: 361, SEQ ID NO: 311, SEQ ID NO: 394 and SEQ ID NO: 396 and binds CD3 epsilon;
the CD3 protein complex and EGFR, wherein the first polypeptide has an amino acid sequence of SEQ ID NO: 343 and is assembled with a light chain of amino acid sequence of SEQ ID NO: 344 and binds EGFR, and wherein the second polypeptide has an amino acid sequence selected from the group comprising of SEQ ID NO: 361, SEQ ID NO: 311, SEQ ID NO: 394 and SEQ ID NO: 396 and binds CD3 epsilon;
the CD3 protein complex and IgE, wherein the first polypeptide has an amino acid sequence of SEQ ID NO: 345 and is assembled with a light chain of amino acid sequence of SEQ ID NO: 346 and binds IgE, and wherein the second polypeptide has an amino acid sequence selected from the group comprising of SEQ ID NO: 361, SEQ ID NO: 311, SEQ ID NO: 394 and SEQ ID NO: 396 and binds CD3 epsilon;
the CD3 protein complex and IgE, wherein the first polypeptide has an amino acid sequence of SEQ ID NO: 347 and is assembled with a light chain of amino acid sequence of SEQ ID NO: 348 and binds IgE, and wherein the second polypeptide has an amino acid sequence selected from the group comprising of SEQ ID NO: 361, SEQ ID NO: 311, SEQ ID NO: 394 and SEQ ID NO: 396 and binds CD3 epsilon.

[0079] In accordance with a further aspect of the present invention the hetero-dimeric immunoglobulin or fragment thereof wherein said CD3 binding polypeptide comprises at least one or a combination of a heavy and light chain variable regions selected from the group: SEQ ID NOs: 101/105, 103/106, 104/106, 104/401, 104/402.

[0080] As discussed above for bispecific antibody generation, there is a need to efficiently produce anti-human CD3 based heavy chain hetero-dimers free of anti-human CD3 homo-dimers wherein the secreted bispecific antibody product is readily isolated from the cell culture supernatant from a recombinant mammalian host cell line. To this effect, a Protein A based differential purification technique can be used to isolate hetero-dimeric immunoglobulins or fragments thereof encompassing the variable domain subclass of VH3, wherein the Protein A binding site in at least one but preferably both VH3 based epitope binding regions is abrogated. Therefore, in another aspect, the present invention provides an in vitro method for the production of a hetero-dimeric immunoglobulin or fragment thereof as described herein, comprising the following steps:

ia) preparing a DNA vector encoding a heavy chain of the first polypeptide and a DNA vector encoding a heavy chain of the second polypeptide wherein one or both DNA vectors or a third DNA vector optionally encode a common light chain or a light chain that assembles with a heavy chain of the first or second polypeptide; or
ib) preparing one DNA vector encoding heavy chains of the first and second polypeptides wherein the DNA vector optionally encodes a common light chain or a light chain that assembles with a heavy chain of the first or second polypeptide; and wherein said DNA vectors are suitable for transient or stable expression in a mammalian host cell;
ii) transfecting or co-transfecting the DNA vector(s) from (i) in a mammalian host cell line;
iii) culturing the transfected cell line or stably selected clone therefrom and harvesting the cell culture supernatant;
iv) contacting the cell culture supernatant on a Protein A affinity chromatography resin;
v) eluting and collecting the hetero-dimeric immunoglobulin of interest.

[0081] Preferably the hetero-dimeric immunoglobulin or fragment thereof found in the purified material from step (v) is at least 95% pure. More preferably the hetero-dimeric immunoglobulin or fragment thereof found in the purified material from step (v) is at least 96% pure. Even more preferably the hetero-dimeric immunoglobulin or fragment thereof found in the purified material from step (v) is at least 97%. Purity of the hetero-dimeric immunoglobulin or fragment thereof found in the purified material can be measured by capillary electrophoresis.

### BRIEF DESCRIPTION OF THE FIGURES

[0082] FIG. 1: Schematic diagram of the preferred differential affinity purification technique using Protein A. None of the heavy chains encompass a VH3 based antigen binding site. Legend: [(A+)] means a functional Protein A binding site and [(A−)] means a nonfunctional Protein A binding site. pH of elution is indicated.

[0083] FIG. 2A-F: Schematic diagrams illustrating the problems faced when purifying hetero-dimers of heavy chains encompassing one or more VH3 domains using differential protein A chromatography. Examples of solutions based on mutating the Protein A binding site within at least one VH3 domain of the hetero-dimer are shown. FIG. 2A: Problem faced when the hetero-dimer of heavy chains encompasses a VH3 domain within the heavy chain that does not bind Protein A in its Fc region. FIG. 2B: Solution to the purification problem described in FIG. 2A, the heavy chain of the hetero-dimer that does not bind Protein A in its Fc region encompasses a VH3 domain which has been mutated to abrogate its Protein A binding site. FIG. 2C: Alternative solution to the problem described in FIG. 2A, the hetero-dimer encompasses only one VH3 domain and the hetero-dimer is engineered to have its VH3 domain located on the heavy chain that binds Protein A in its Fc region (VH3 domain relocation strategy as a solution). FIG. 2D: Problem faced when both heavy chains of the hetero-dimer encompass a VH3 domain. FIG. 2E: Solution to the purification problem described in FIG. 2D, the heavy chain of the hetero-dimer that does not bind Protein A in its Fc region encompasses a VH3 domain which has been mutated to abrogate its Protein A binding site. FIG. 2F: Alternative solution to the purification problem described in FIG. 2D, each VH3 domain has its Protein A binding site abrogated. Boxed species indicated that these species co-elute during the differential Protein A chromatography process. pH values A and B differ by about one pH unit and allow efficient separation of the species that binds Protein A. Typically pH values for pH A and pH B are 4 and 3, respectively. Legend for all figures: [(A+)] means a functional Protein A binding site and [(A−)] means a nonfunctional Protein A binding site.

[0084] FIG. 3: Protein A gradient mode chromatography traces for Fc 133 (HiTrap™ MabSelect SuRe™ Protein A column). Plots of absorbance at 280 nm vs. total volume of mobile phase are shown as solid line. Plots of mobile phase pH and percentage of eluent buffer (B) present in mobile phase are shown as dashed and dotted-dashed lines, respectively.

[0085] FIG. 4A-C: Protein A gradient mode chromatography traces. Plots of absorbance at 280 nm vs. total volume of mobile phase are shown as solid line. Plots of mobile phase pH and percentage of eluent buffer (B) present in mobile phase are shown as dashed and dotted-dashed lines, respectively. FIG. 4A: Anti-HER2 FAB-Fc 133 (HiTrap™ MabSelect SuRe™ Protein A column). FIG. 4B: Anti-HER2 scFv-Fc 133 (HiTrap™ MabSelect SuRe™ Protein A column). FIG. 4C: Anti-HER2 FAB (HiTrap™ MabSelect SuRe™ Protein A column and HiTrap™ MabSelect™ Protein A column).

[0086] FIG. 5: Representative amino acid sequences for each of the seven known human VH framework subclasses. Sequences were aligned according to the Kabat numbering. Positions in the human VH3-23 framework subclass that interact with the domain D of Protein A are shown in bold.

[0087] FIG. 6A-I: Protein A gradient mode chromatography traces (HiTrap™ MabSelect™ Protein A column). Plots of absorbance at 280 nm vs. total volume of mobile phase are shown as solid line. Plots of mobile phase pH and percentage of eluent buffer (B) present in mobile phase are shown as dashed and dotted-dashed lines, respectively. FIG. 6A: Anti-HER2 FAB. FIG. 6B: Anti-HER2 FAB T57A. FIG. 6C: Anti-HER2 FAB T57E. FIG. 6D: Anti-HER2 FAB G65S. FIG. 6E: Anti-HER2 FAB R66Q. FIG. 6F: Anti-HER2 FAB T68V. FIG. 6G: Anti-HER2 FAB Q81E. FIG. 6H: Anti-HER2 FAB N82aS. FIG. 6I: Anti-HER2 FAB R19G/T57A/Y59A.

[0088] FIG. 7: Equilibrium dissociation constants (KD) of selected anti-HER2 FAB variants for the HER2 antigen.

[0089] FIG. 8A-D: Protein A gradient mode chromatography traces (HiTrap™ MabSelect SuRe™ Protein A column). Plots of absorbance at 280 nm vs. total volume of mobile phase are shown as solid line. Plots of mobile phase pH and percentage of eluent buffer (B) present in mobile phase are shown as dashed and dotted-dashed lines, respectively. FIG. 8A: Anti-HER2 scFv(G65S)-Fc 133. FIG. 8B: Anti-HER2 scFv(N82aS)-Fc 133. FIG. 8C: Anti-HER2 FAB(G65S)-Fc 133. FIG. 8D: Anti-HER2 FAB(N82aS)-Fc 133.

[0090] FIG. 9A-F: These figures all relate to OKT3 humanization on stable human frameworks. FIG. 9A-C: Summary of humanized candidates formatted as human IgG1 antibodies. HPB-ALL staining relative to the chimeric OKT3 antibody: (−) indicates no binding, (+) weaker binding, (++) moderate binding and (+++) similar binding. FIG. 9D: DSC profiles of selected antibodies of candidates. FIG. 9E: Summary of humanized candidates formatted as scFv-Fc fusions. HPB-ALL staining relative to the chimeric OKT3 antibody: (−) indicates no binding, (+) weaker binding, (++) moderate binding and (+++) similar binding. FIG. 9F: DSC profiles of selected scFv-Fc candidates.

[0091] FIG. 10A-B: These figures all relate to SP34 humanization on stable human frameworks. FIG. 10A: Summary of humanized candidates formatted as human IgG1 antibodies. FIG. 10B: Summary of humanized candidates formatted as scFv-Fc fusion proteins (Fc of human IgG1 isotype). SPR data relative to the chimeric SP34 antibody for human and cynomolgus monkey CD3 epsilon 1-26_Fc fusion proteins: (−) indicates no binding, (+) weaker binding, (++) moderate binding, strong but not similar binding (+++), and (++++) similar binding.

[0092] FIG. 11A-J: These figures all relate to anti-human CD38 antibodies.

[0093] FIG. 11A: Antibody-antigen interaction measured by SPR between the chimeric HB-7 antibody and the human CD38 antigen. A CMS sensor chip was covalently coupled with protein G and 200 RUs of chimeric HB-7 antibody were captured. Human CD38 protein (human CD38 extracellular domain with a poly-histidine tag) was injected at 125, 31, 7.8, 3.9, 1.9, 1 and 0.5 nM at a flow rate of 30 μl/min in HBS-P. FIG. 11B: Antibody-antigen interaction measured by SPR between the humanized HB-7 best-fit antibody and the human CD38 antigen. A CMS sensor chip was covalently coupled with protein G and 200 RUs of humanized HB-7 best-fit antibody were captured. Human CD38 protein (human CD38 extracellular domain with a poly-histidine tag) was injected at 50, 25, 12.5, 6.25 and 0.39 nM at a flow rate of 30 μl/min in HBS-P. FIG. 11C: Antibody-antigen interaction measured by SPR between the humanized 9G7 best-fit antibody and the human CD38 antigen. A CMS sensor chip was covalently coupled with protein G and 200 RUs of humanized 9G7 best-fit antibody were captured. Human CD38 protein (human CD38 extracellular domain with a poly-histidine tag) was injected at 25, 12.5, 6.25, 3.12, 1.56, 0.78, 0.39, 0.19, and 0.1 nM at a flow rate of 30 μl/min in HBS-P. FIG. 11D: Antibody-antigen interaction measured by SPR between the humanized 9G7 best-framework antibody and the human CD38 antigen. A CMS sensor chip was covalently coupled with protein G and 200 RUs of humanized 9G7 best-framework antibody were captured. Human CD38 protein (human CD38 extracellular domain with a poly-histidine tag) was injected at 50, 25, 12.5, 6.25, 3.12, 1.56, 0.78, 0.39, 0.19, and 0.1 nM at a flow rate of 30 μl/min in HBS-P. FIG. 11E: Antibody-antigen interaction measured by SPR between the human 767 antibody and the human CD38 antigen. A CMS sensor chip was covalently coupled with protein G and 200 RUs of human 767 antibody were captured. Human CD38 protein (human CD38 extracellular domain with a poly-histidine tag) was injected at 500, 250, 125, 62.5, 31.25, and 15.6 nM at a flow rate of 30 μl/min in HBS-P. Affinity was obtained from a plot of the equilibrium response (Req) vs. analyte concentration (C) according to the following equation: Req=KA*C*Rmax/(KA*C*n+1), concentration at 50% saturation is KD. All SPR data are expressed as number of response units (abbreviated RU; Y axis) vs. time (X axis). FIG. 11F: DSC profiles of chimeric HB-7 and humanized HB-7 best-fit antibodies. FIG. 11G: DSC profiles of chimeric 9G7 and humanized 9G7 best-fit antibodies. FIG. 11H: DSC profiles of humanized 9G7 best-framework antibody. FIG. 11I: DSC profiles of human clone 767 antibody. FIG. 11J: summary table for the 9G7 humanized antibodies.

[0094] FIG. 12A-C: Schematic diagram of the BEAT HER2/CD3 antibodies in alternative formats. FIG. 12A: BEAT HER2/CD3-1 (format A) and BEAT HER2/CD3-2 (format B) antibodies. FIG. 12B: BEAT HER2/CD3-3 (format C) and BEAT HER2/CD3(SP34) (format D) antibodies. FIG. 12C: BEAT HER2/CD3(SP34-Kappa1) (format E) antibody. Legend: [(A+)] means functional Protein A binding site. [(A−)] means nonfunctional Protein A binding site.

[0095] FIG. 13: Protein A purification profile of BEAT HER2/CD3-1 antibody (Absorbance trace at 280 nm). Column: 1 ml MabSelect SuRe. Flow rate: 1 ml/min. Running buffer: 0.2 M NaH₂PO₄ pH 6. Elution buffer No 1: 20 mM Na Acetate pH 4 (20 ml). Elution buffer No 2: 0.1 M Glycine pH 3 (20 ml). Neutralization: 1/10 vol. of 1M Tris pH 8.

[0096] FIG. 14: Capillary Electrophoresis profile of BEAT HER2/CD3-1 antibody preparations.

[0097] FIG. 15A: SDS-PAGE analysis of N82aS substituted BEAT HER2/CD3-1 antibody. FIG. 15B: SDS-PAGE analysis of N82aS non substituted BEAT HER2/CD3-1 antibody variant. Legend: [(A+)] means a functional Protein A binding site and [(A−)] means a nonfunctional Protein A binding site. pH of elution is indicated.

[0098] FIG. 16A: Antibody-antigen interaction measured by SPR between the BEAT HER2/CD3-1 antibody and the human CD3 epsilon antigen. A CM5 sensor chip was covalently coupled with 7400 RUs of the human CD3 gamma-epsilon-Fc fusion protein. BEAT HER2/CD3-1 antibody was injected at 5000, 2500, 1250, 625, 312.5 and 156.25 nM at a flow rate of 10 μl/min in HBS-P. Data are expressed as number of response units (abbreviated RU; Y axis) vs. time (X axis). Affinity was obtained from a plot of the equilibrium response (Req) vs. analyte concentration (C) according to the following equation:

Req=KA*C*Rmax/(KA*C*n+1),

[0099] concentration at 50% saturation is KD. FIG. 16B: Antibody-antigen interaction measured by SPR between the BEAT HER2/CD3-1 antibody and the human HER2 antigen. A CMS sensor chip was covalently coupled protein G and 150 RUs of BEAT HER2/CD3-1 antibody were captured. HER2-his was injected at 1000, 333, 111, 37, 12, 4.1, 1.4, 0.5 and 0.15 nM at a flow rate of 30 μl/min in HBS-P. Data are expressed as number of response units (abbreviated RU; Y axis) vs. time (X axis). FIG. 16C: DSC profiles of BEAT HER2/CD3-1 and -2 antibodies shown in profiles A and B, respectively.

[0100] FIG. 17A-G: Examples of T cell redirected killing by the BEAT HER2/CD3 antibodies. Readout: RDL-MTS method. Effector cells: human PBMCs. Effector cells-to-targeted cells ratio of 10:1. Means of three donors with 48 h incubation. Antibody concentrations are shown in nM. FIG. 17A: BEAT HER2/CD3-1 and BEAT HER2/CD3-2 antibodies, target cells: BT-474. FIG. 17B: BEAT HER2/CD3-1 and BEAT HER2/CD3-2 antibodies, target cells: JIMT-1. FIG. 17C: BEAT HER2/CD3-1 and BEAT HER2/CD3-2 antibodies, target cells: MDA-MB-231. FIG. 17D: BEAT HER2/CD3(SP34) antibody, target cells: NCI-N87. FIG. 17E: BEAT HER2/CD3(SP34) antibody, target cells: HT-1080. FIG. 17F: BEAT HER2/CD3(SP34-Kappa1) antibody, target cells: NCI-N87. FIG. 17G: BEAT HER2/CD3(SP34-Kappa1) antibody, target cells: HT-1080.

[0101] FIG. 18A-C: JIMT-1 xenografts with human PBMC supplementation. FIG. 18A: Human PBMCs do not interfere with tumor growth. FIG. 18B-C: Tumor volumes (mm³) for BEAT HER2/CD3-1 treated and non-treated mice, four human PBMC donors, cohorts of five mice.

[0102] FIG. 19: Schematic diagram of the BEAT CD38-HB7bestfit/CD3 (format A) and BEAT CD38-767/CD3 (format B) antibodies. [(A+)] means functional Protein A binding site. [(A−)] means nonfunctional Protein A binding site.

[0103] FIG. 20A: Antibody-antigen interaction measured by SPR between the BEAT CD38-HB7bestfit/CD3 antibody and the human CD38 antigen. A CM5 sensor chip was covalently coupled with protein G and 200 RUs of BEAT CD38-HB7bestfit/CD3 antibody were captured. Human CD38 protein (poly-histidine tagged protein) was injected at 50, 25, 12.5, 6.25 and 0.39 nM at a flow rate of 30 μl/min in HBS-P. Data are expressed as number of response units (abbreviated RU; Y axis) vs. time (X axis). FIG. 20B: BEAT CD38-HB7bestfit/CD3 antibody DSC profile.

[0104] FIG. 21: Example of T cell redirected killing by the BEAT CD38-HB7bestfit/CD3 antibody. Readout: RDL-FACS method. Effector cells: purified human T cells. Effector cells-to-targeted cells ratio of 10:1. Mean of two donors with 48 h incubation. Target cells: RPMI 8226. Antibody concentration is shown in nM.

[0105] FIG. 22: Example of T cell redirected killing by the BEAT CD38-767/CD3(SP34) antibody. Readout: RDL-FACS method. Effector cells: human PBMCs. Effector cells-to-targeted cells ratio of 10:1. Mean of three donors with 24 h incubation. Target cells: Daudi. Antibody concentration is shown in nM.

[0106] FIG. 23: Schematic diagram of the BEAT OX40/CD3 antibody. Legend: [(A+)] means functional Protein A binding site. [(A−)] means nonfunctional Protein A binding site.

[0107] FIG. 24: Example of T cell redirected killing by the BEAT OX40/CD3 antibody. Readout: RDL-MTS method. Effector cells: Human PBMCs. Effector cells-to-targeted cells ratio of 20:1. Mean of three donors with 48 h incubation. Target cells: recombinant stable CHO[OX40] cells. Antibody concentration is shown in nM.

[0108] FIG. 25: Schematic diagram of the BEAT EGFR/CD3 antibody. Legend: [(A+)] means functional Protein A binding site. [(A−)] means nonfunctional Protein A binding site.

[0109] FIG. 26: Example of T cell redirected killing by the BEAT EGFR/CD3 antibody. Readout: RDL-MTS method. Effector cells: Human PBMCs. Effector cells-to-targeted cells ratio of 10:1. Mean of four donors with 48 h incubation. Target cells: HT-29 cells. Antibody concentration is shown in nM.

[0110] FIG. 27: Schematic diagram of the BEAT CD38-HB7bestfit/CD3(SP34) (format A) and BEAT CD38-9G7bestfit/CD3(SP34-Kappa2) (format B) antibodies. [(A+)] means functional Protein A binding site.

[0111] FIG. 28: Example of T cell redirected killing by the BEAT CD38-HB7bestfit/CD3(SP34) antibody. Readout: RDL-FACS method. Effector cells: Human PBMCs. Effector cells-to-targeted cells ratio of 10:1. Mean of three donors with 24 h incubation. Target cells: Daudi cells. Antibody concentration is shown in nM.

[0112] FIG. 29: Antibody-antigen interaction measured by SPR between the BEAT CD38-9G7bestfit/CD3(SP34-Kappa2) antibody and the human CD3 epsilon 1-26_Fc fusion protein. A CMS sensor chip was covalently coupled with 500 RUs of the human CD3 epsilon 1-26_Fc fusion protein. BEAT CD38-9G7bestfit/CD3(SP34-Kappa2) antibody was injected at 50, 25, 12.5, 6.2, 3.1, 0.8 and 0.4 nM at a flow rate of 30 μl/min in HBS-P. Data are expressed as number of response units (abbreviated RU; Y axis) vs. time (X axis).

[0113] FIG. 30: Example of T cell redirected killing by the BEAT CD38/CD3(SP34-Kappa2) antibody. Readout: RDL-FACS method. Effector cells: Human PBMCs. Effector cells-to-targeted cells ratio of 10:1. Mean of three donors with 24 h incubation. Target cells: Daudi cells. Antibody concentration is shown in nM.

[0114] FIG. 31: Schematic diagram of the BEAT CD20/CD3(SP34) antibody. [(A+)] means functional Protein A binding site.

[0115] FIG. 32: Example of T cell redirected killing by the BEAT CD20/CD3(SP34) antibody. Readout: RDL-FACS method. Effector cells: Human PBMCs. Effector cells-to-targeted cells ratio of 10:1. Means of three donors with 24 h incubation. Target cells: Daudi cells. Antibody concentration is shown in nM.

[0116] FIG. 33 Shows the relative expression levels after reformatting from IgG1 to scFv-Fc for the SP34 chimera as well as Sp34 H1L21, wherein a dramatic loss of expression was observed.

[0117] FIG. 34 Shows the effects on expression level of an SP34 H1L21 ScFv-Fc by Alanine scan in positions: T27, G27a, V27c, T28, T29, S30, N31, Y32, N52, K53, R54, P56, L90, Y92, S93, N94, and L95.

[0118] FIG. 35a Shows the effects on expression level of random mutation at position 29 of a SP34 H3L23 ScFv-Fc; b Shows the effects on expression level of random mutation at position 30 of a SP34 H3L23 ScFv-Fc; c Shows the effects on expression level of random mutation at position 95 of a SP34 H5L23 ScFv-Fc.

[0119] FIG. 36 shows the normalised expression level for several humanized SP34.

[0120] FIG. 37 shows the performance in an RDL assay of several CD38/CD3 bispecific antibodies, in which the CD3 binding arm comprises the original mouse SP34 reformatted as an scFv (SEQ ID NO: 403), or modified humanised SP34 scFv's comprising the heavy/light chain combinations H1/L21 (SEQ ID NO: 361), H5/L32 (SEQ ID NO: 311), H5/L65 (SEQ ID NO: 394) and H5/L67 (SEQ ID NO: 396).

[0121] FIG. 38 shows the effect of a CD3-Rituximab BEAT bispecific on a RAH cell population.

[0122] FIG. 39 shows the effect in a RDL assay of Erbitux on the MCF-7, HCT116 and A549 cell populations.

[0123] FIG. 40 shows the effect in a RDL assay of a CD3-Erbitux BEAT bispecific antibody on the MCF-7, HCT116 and A549 cell populations.

[0124] FIG. 41 shows the EGFR status of the cell lines determined using the EGFR PharmDx immunohistochemistry kit (Dako, Cambridge, UK).

[0125] FIG. 42 shows the effect in a RDL assay of Vectibix on the MCF-7, HCT116 and A549 cell populations.

[0126] FIG. 43 shows the effect in a RDL assay of a CD3-Vectibix BEAT bispecific antibody on the MCF-7, HCT116 and A549 cell populations

### DETAILED DESCRIPTION OF THE INVENTION

[0127] The present invention relates generally to novel hetero-dimeric immunoglobulins that bind to the CD3 protein complex and a disease associated antigen. Furthermore, these hetero-dimeric immunoglobulins have reduced or eliminated binding to protein A and therefore can be purified to a very high degree of purity using affinity chromatography.

[0128] For the purposes of interpreting this specification, the following definitions will apply and whenever appropriate, terms used in the singular will also include the plural and vice versa. It is to be understood that the terminology used herein is for the purpose of describing particular embodiments only and is not intended to be limiting.

[0129] The terms “polypeptide” and “protein” refer to a polymer of amino acid residues wherein amino acids are combined via peptide bonds to form a chain of amino acids that have been linked together via dehydration synthesis. Polypeptides and proteins can be synthesized through chemical synthesis or recombinant expression and are not limited to a minimum amino acid length.

[0130] In accordance with the invention, the group of polypeptides comprises “proteins” as long as the proteins consist of a single polypeptide chain. Polypeptides may further form multimers such as dimers, trimers and higher oligomers, i.e. consisting of more than one polypeptide molecule. Polypeptide molecules forming such dimers, trimers etc. may be identical or non-identical. The corresponding higher order structures of such multimers are, consequently, termed homo- or hetero-dimers, homo- or hetero-trimers etc. An example for a hetero-multimer is an antibody molecule, which, in its naturally occurring form, consists of two identical light polypeptide chains and two identical heavy polypeptide chains. The terms “polypeptide” and “protein” also refer to naturally modified polypeptides/proteins wherein the modification is effected e.g. by post-translational modifications like glycosylation, acetylation, phosphorylation and the like. Such modifications are well known in the art. Furthermore, for purposes of the present invention, a “polypeptide” refers to a protein which includes modifications, such as deletions, additions and substitutions (which can be conservative in nature) to the native sequence. These modifications may be deliberate, as through site-directed mutagenesis, or may be accidental, such as through mutations of hosts which produce the proteins or errors due to PCR amplification.

[0131] The term “CD3 complex” as used herein refers to the protein complex known as the CD3 (cluster of differentiation 3) T-cell co-receptor (Wucherpfennig K W et al., (2010) Cold Spring Harb Perspect Biol, 2(4): a005140). The CD3 protein complex is composed of four distinct chains. In mammals, the complex contains a CD3γ chain, a CD3δ chain, and two CD3ε chains. These chains associate with a molecule known as the T-cell receptor (TCR) and the ζ-chain to generate an activation signal in T lymphocytes (van der Merwe P A & Dushek O (2011) Nat Rev Immunol, 11(1): 47-55). The TCR, ζ-chain, and CD3 molecules together comprise the TCR complex. The CD3γ, CD3δ, and CD3ε chains are highly related cell-surface proteins of the immunoglobulin superfamily containing a single extracellular immunoglobulin domain. The intracellular tails of the CD3 molecules contain a single conserved motif known as an immunoreceptor tyrosine-based activation motif or ITAM for short, which is essential for the signalling capacity of the TCR. Since CD3 is required for T-cell activation, drugs (often monoclonal antibodies) that target CD3 have and are being investigated as immunosuppressant therapies.

[0132] The term “disease associated antigen” as used herein refers to molecules that are involved in a disease process. Examples of disease associated antigens are found in a broad range of therapeutic areas such as inflammation, cancer and autoimmune diseases. In oncology, disease associated antigens are molecules that can broadly be used for the screening and/or monitoring and/or therapeutic targeting of cancers within a patient population, for example EpCAM antigen in prostate cancer. Tumour antigens can be produced directly by the tumour or by non-tumour cells as a response to the presence of a tumour and preferred tumour antigens are cell-surface molecules. Inflammatory disease associated antigens are known, which include but are not limited to, pro-inflammatory cytokines such as TNF-α and IL-1. Autoimmune disease associated antigens are also known; examples of these include but are not limited to antibodies against double-stranded DNA in systemic lupus erythematosus and amyloid beta peptide in Alzheimers disease.

[0133] The term “immunoglobulin” as referred to herein can be used interchangeably with the term “antibody”. Immunoglobulin includes full-length antibodies and any antigen binding fragment or single chains thereof. Immunoglobulins can be homo-dimeric or hetero-dimeric. Immunoglobulins and specifically naturally occurring antibodies are glycoproteins which exist as one or more copies of a Y-shaped unit, composed of four polypeptide chains. Each “Y” shape contains two identical copies of a heavy (H) chain and two identical copies of a light (L) chain, named as such by their relative molecular weights. Each light chain pairs with a heavy chain and each heavy chain pairs with another heavy chain. Covalent interchain disulfide bonds and non-covalent interactions link the chains together. Immunoglobulins and specifically naturally occurring antibodies contain variable regions, which are the two copies of the antigen binding site. Papain, a proteolytic enzyme splits the “Y” shape into three separate molecules, two so called “Fab” or “FAB” fragments (Fab=fragment antigen binding) and one so called “Fc” fragment or “Fc region” (Fc=fragment crystallizable). A Fab fragment consists of the entire light chain and part of the heavy chain. The heavy chain contains one variable region (VH) and either three or four constant regions (CH1, CH2, CH3 and CH4, depending on the antibody class or isotype). The region between the CH1 and CH2 regions is called the hinge region and permits flexibility between the two Fab arms of the Y-shaped antibody molecule, allowing them to open and close to accommodate binding to two antigenic determinants separated by a fixed distance. The “hinge region” as referred to herein is a sequence region of 6-62 amino acids in length, only present in IgA, IgD and IgG, which encompasses the cysteine residues that bridge the two heavy chains. The heavy chains of IgA, IgD and IgG each have four regions, i.e. one variable region (VH) and three constant regions (CH1-3). IgE and IgM have one variable and four constant regions (CH1-4) on the heavy chain. The constant regions of the immunoglobulins may mediate the binding to host tissues or factors, including various cells of the immune system (e.g., effector cells) and the first component (C1q) of the complement system classical pathway. Each light chain is usually linked to a heavy chain by one covalent disulfide bond. Each light chain contains one variable region (VL) and one light chain constant region. The light chain constant region is a kappa light chain constant region designated herein as IGKC or is a lambda light chain constant region designated herein as IGLC. IGKC is used herein equivalently to Cκ or CK and has the same meaning. IGLC is used herein equivalently to Cλ or CL and has the same meaning. The term “an IGLC region” as used herein refer to all lambda light chain constant regions e.g. to all lambda light chain constant regions selected from the group consisting of IGLC1, IGLC2, IGLC3, IGLC6 and IGLC7. The VH and VL regions can be further subdivided into regions of hypervariability, termed complementarity determining regions (CDR), interspersed with regions that are more conserved, termed framework regions (FR or FW). Each VH and VL is composed of three CDRs and four FRs, arranged from amino-terminus to carboxy-terminus in the following order: FR1, CDR1, FR2, CDR2, FR3, CDR3, FR4. The variable regions of the heavy and light chains contain an epitope-binding region that interacts with an antigen. Engineered immunoglobulins can encompass different epitope binding region formats such as scFv, FAB or dAb fragments. These fragments are usually assembled in an antibody-like structure by genetic fusion to a IgG Fc region. Engineered immunoglobulins can be constructed as homo or hetero-dimers with or without the use of hetero-dimerization enhancing techniques, and can have mono- or bispecific binding properties.

[0134] The term “full length antibody” as used herein includes the structure that constitutes the natural biological form of an antibody, including variable and constant regions. For example, in most mammals, including humans and mice, the full length antibody of the IgG class is a tetramer and consists of two identical pairs of two immunoglobulin chains, each pair having one light and one heavy chain, each light chain comprising immunoglobulin regions VL and a light chain constant region, and each heavy chain comprising immunoglobulin regions VH, CH1 (Cy1), CH2 (Cy2), CH3 (Cy3) and CH4 (Cy4), depending on the antibody class or isotype). In some mammals, for example in camels and llamas, IgG antibodies may consist of only two heavy chains, each heavy chain comprising a variable region attached to the Fc region.

[0135] Antibodies are grouped into classes, also referred to as isotypes, as determined genetically by the constant region. Human constant light chains are classified as kappa (CK) and lambda (Cλ) light chains. Heavy chains are classified as mu (μ), delta (δ), gamma (γ), alpha (α), or epsilon (ε) and define the antibody's isotype as IgM, IgD, IgG, IgA and IgE, respectively. Thus, “isotype” as used herein is meant any of the classes and/or subclasses of immunoglobulins defined by the chemical and antigenic characteristics of their constant regions. The known human immunoglobulin isotypes are IGHG1 (IgG1), IGHG2 (IgG2), IGHG3 (IgG3), IGHG4 (IgG4), IGHA1 (IgA1), IGHA2 (IgA2), IGHM (IgM), IGHD (IgD) and IGHE (IgE). The so-called human immunoglobulin pseudo-gamma IGHGP gene represents an additional human immunoglobulin heavy constant region gene which has been sequenced but does not encode a protein due to an altered switch region (Bensmana M et al., (1988) Nucleic Acids Res, 16(7): 3108). In spite of having an altered switch region, the human immunoglobulin pseudo-gamma IGHGP gene has open reading frames for all heavy constant regions (CH1-CH3) and hinge. All open reading frames for its heavy constant regions encode protein regions which align well with all human immunoglobulin constant regions with the predicted structural features. This additional pseudo-gamma isotype is referred herein as IgGP or IGHGP. Other pseudo immunoglobulin genes have been reported such as the human immunoglobulin heavy constant region epsilon P1 and P2 pseudo-genes (IGHEP1 and IGHEP2). The IgG class is the most commonly used for therapeutic purposes. In humans this class comprises subclasses IgG1, IgG2, IgG3 and IgG4. In mice this class comprises subclasses IgG1, IgG2a, IgG2b, IgG2c and IgG3.

[0136] The term “Immunoglobulin fragments” as used herein include, but is not limited to, (i) a region including for example a CH1, a CH2 or a CH3 region, (ii) the Fab fragment consisting of VL, VH, CL or CK and CH1 regions, including Fab′ and Fab′-SH, (ii) the Fd fragment consisting of the VH and CH1 regions, (iii) the dAb fragment (Ward E S et al., (1989) Nature, 341(6242): 544-6) which consists of a single variable region (iv) F(ab′)₂ fragments, a bivalent fragment comprising two linked Fab fragments (v) single chain Fv fragments (scFv), wherein a VH region and a VL region are linked by a peptide linker which allows the two regions to associate to form an antigen binding site (Bird R E et al., (1988) Science, 242(4877): 423-6; Huston J S et al., (1988) Proc Natl Acad Sci USA, 85(16): 5879-83), (vi) “diabodies” or “triabodies”, multivalent or multispecific fragments constructed by gene fusion (Holliger P et al., (1993) Proc Natl Acad Sci USA, 90(14): 6444-8; Tomlinson I & Holliger P, (2000) Methods Enzymol, 326:461-79), (vii) scFv, diabody or region antibody fused to an Fc region and (viii) scFv fused to the same or a different antibody.

[0137] The term “variable region” refers to the regions or domains that mediates antigen-binding and defines specificity of a particular antibody for a particular antigen. In naturally occurring antibodies, the antigen-binding site consists of two variable regions that define specificity: one located in the heavy chain, referred herein as heavy chain variable region (VH) and the other located in the light chain, referred herein as light chain variable region (VL). In humans, the heavy chain variable region (VH) can be divided into seven subgroups or subclasses: VH1, VH2, VH3, VH4, VH5, VH6 and VH7. In some cases, specificity may exclusively reside in only one of the two regions as in single-domain antibodies from heavy-chain antibodies found in camelids. The V regions are usually about 110 amino acids long and consist of relatively invariant stretches of amino acid sequence called framework regions (FRs or “non-CDR regions”) of 15-30 amino acids separated by shorter regions of extreme variability called “hypervariable regions” that are 7-17 amino acids long. The variable domains of native heavy and light chains comprise four FRs, largely adopting a beta-sheet configuration, connected by three hypervariable regions, which form loops. The hypervariable regions in each chain are held together in close proximity by FRs and, with the hypervariable regions from the other chain, contribute to the formation of the antigen binding site of antibodies (see Kabat E A et al., supra.). The term “hypervariable region” as used herein refers to the amino acid residues of an antibody which are responsible for antigen binding. The hypervariable region generally comprises amino acid residues from a “complementary determining region” or “CDR”, the latter being of highest sequence variability and/or involved in antigen recognition. For all variable regions numbering is according to Kabat (Kabat E A et al., supra.).

[0138] A number of CDR definitions are in use and are encompassed herein. The Kabat definition is based on sequence variability and is the most commonly used (Kabat E A et al., supra.). Chothia refers instead to the location of the structural loops (Chothia & Lesk J. (1987) Mol Biol, 196: 901-917). The AbM definition is a compromise between the Kabat and the Chothia definitions and is used by Oxford Molecular's AbM antibody modelling software (Martin A C R et al., (1989) Proc Natl Acad Sci USA 86:9268-9272; Martin A C R et al., (1991) Methods Enzymol, 203: 121-153; Pedersen J T et al., (1992) Immunomethods, 1: 126-136; Rees A R et al., (1996) In Sternberg M. J. E. (ed.), Protein Structure Prediction. Oxford University Press, Oxford, 141-172). The contact definition has been recently introduced (MacCallum R M et al., (1996) J Mol Biol, 262: 732-745) and is based on an analysis of the available complex structures available in the Protein Databank. The definition of the CDR by IMGT®, the international ImMunoGeneTics information System® (http://www.imgt.org) is based on the IMGT numbering for all immunoglobulin and T cell receptor V-REGIONs of all species (IMGT®, the international ImMunoGeneTics information System®; Lefranc M P et al., (1999) Nucleic Acids Res, 27(1): 209-12; Ruiz M et al., (2000) Nucleic Acids Res, 28(1): 219-21; Lefranc M P (2001) Nucleic Acids Res, 29(1): 207-9; Lefranc M P (2003) Nucleic Acids Res, 31(1): 307-10; Lefranc M P et al., (2005) Dev Comp Immunol, 29(3): 185-203; Kaas Q et al., (2007) Briefings in Functional Genomics & Proteomics, 6(4): 253-64). All Complementarity Determining Regions (CDRs) as referred to in the present invention, are defined preferably as follows (numbering according to Kabat E A et al., supra): LCDR1: 24-34, LCDR2: 50-56, LCDR3: 89-98, HCDR1: 26-35, HCDR2: 50-65, HCDR3: 95-102.

[0139] The “non-CDR regions” of the variable domain are known as framework regions (FR). The “non-CDR regions” of the VL region as used herein comprise the amino acid sequences: 1-23 (FR1), 35-49 (FR2), 57-88 (FR3) and 99-107 (FR4). The “non-CDR regions” of the VH region as used herein comprise the amino acid sequences: 1-25 (FR1), 36-49 (FR2), 66-94 (FR3) and 103-113 (FR4).

[0140] The CDRs of the present invention may comprise “extended CDRs” which are based on the aforementioned definitions and have variable domain residues as follows: LCDR1: 24-36, LCDR2: 46-56, LCDR3:89-97, HCDR1: 26-35, HCDR2:47-65, HCDR3: 93-102. These extended CDRs are numbered as well according to Kabat et al., supra. The “non-extended CDR region” of the VL region as used herein comprise the amino acid sequences: 1-23 (FR1), 37-45 (FR2), 57-88 (FR3) and 98-approximately 107 (FR4). The “non-extended CDR region” of the VH region as used herein comprise the amino acid sequences: 1-25 (FR1), 37-46 (FR2), 66-92 (FR3) and 103-approximately 113 (FR4).

[0141] The term “Fab” or “FAB” or “Fab region” or “FAB region” as used herein includes the polypeptides that comprise the VH, CH1, VL and light chain constant immunoglobulin regions. Fab may refer to this region in isolation, or this region in the context of a full length antibody or antibody fragment.

[0142] The term “Fc” or “Fc region”, as used herein includes the polypeptide comprising the constant region of an antibody heavy chain excluding the first constant region immunoglobulin region. Thus Fc refers to the last two constant region immunoglobulin regions of IgA, IgD and IgG or the last three constant region immunoglobulin regions of IgE and IgM, and the flexible hinge N-terminal to these regions. For IgA and IgM, Fc may include the J chain. For IgG, Fc comprises immunoglobulin regions Cgamma2 and Cgamma3 (Cy2 and Cy3) and the hinge between Cgamma1 (Cy1) and Cgamma2 (Cy2). Although the boundaries of the Fc region may vary, the human IgG heavy chain Fc region is usually defined to comprise residues C226 or P230 to its carboxyl-terminus, wherein the numbering is according to the EU index. Fc may refer to this region in isolation or this region in the context of an Fc polypeptide, for example an antibody.

[0143] The term “immunoglobulin constant region” as used herein refers to immunoglobulin or antibody heavy chain constant regions from human or animal species and encompasses all isotypes. Preferably, immunoglobulin constant regions are of human origin and are selected from the group consisting of, but not limited to: IGHG1 CH1, IGHG2 CH1, IGHG3 CH1, IGHG4 CH1, IGHA1 CH1, IGHA2 CH1, IGHE CH1, IGHEP1 CH1, IGHM CH1, IGHD CH1, IGHGP CH1, IGHG1 CH2, IGHG2 CH2, IGHG3 CH2, IGHG4 CH2, IGHA1 CH2, IGHA2 CH2, IGHE CH2, IGHEP1 CH2, IGHM CH2, IGHD CH2, IGHGP CH2, IGHG1 CH3, IGHG2 CH3, IGHG3 CH3, IGHG4 CH3, IGHA1 CH3, IGHA2 CH3, IGHE CH3, IGHEP1 CH3, IGHM CH3, IGHD CH3, IGHGP CH3, IGHE CH4 and IGHM CH4. Preferred “immunoglobulin constant regions” are selected from the group consisting of human IGHE CH2, IGHM CH2, IGHG1 CH3, IGHG2 CH3, IGHG3 CH3, IGHG4 CH3, IGHA1 CH3, IGHA2 CH3, IGHE CH3, IGHM CH3, IGHD CH3 and IGHGP CH3. More preferred “immunoglobulin constant regions” are selected from the group consisting of human IGHG1 CH3, IGHG2 CH3, IGHG3 CH3, IGHG4 CH3, IGHA1 CH3, IGHA2 CH3, IGHE CH3, IGHM CH3, IGHD CH3 and IGHGP CH3.

[0144] The term “epitope binding region” includes a polypeptide or a fragment thereof having minimal amino acid sequence to permit the specific binding of the immunoglobulin molecule to one or more epitopes. Naturally occurring antibodies have two epitope binding regions which are also known as antigen binding or combining sites or paratopes. Epitope binding regions in naturally occurring antibodies are confined within the CDR regions of the VH and/or VL domains wherein the amino acid mediating epitope binding are found. In addition to naturally occurring antibodies, artificial VH domains or VL domains or fragments thereof and combinations thereof can be engineered to provide epitope binding regions (Holt L J et al., (2003) Trends Biotechnol, 21(11): 484-490; Polonelli L et al., (2008) PLoS ONE, 3(6): e2371). Examples of non-immunoglobulin based epitope binding regions can be found in artificial protein domains used as “scaffold” for engineering epitope binding regions (Binz H K et al., (2005) Nat Biotechnol, 23(10): 1257-1268) or peptide mimetics (Murali R & Greene M I (2012) Pharmaceuticals, 5(2): 209-235). Preferably the term ‘epitope binding region’ includes the combination of one or more heavy chain variable domains and one or more complementary light chain variable domains which together forms a binding site which permits the specific binding of the immunoglobulin molecule to one or more epitopes. Examples of an epitope binding region as exemplified in the present invention include scFv and FAB.

[0145] As used herein, the term “epitope” includes a fragment of a polypeptide or protein or a non-protein molecule having antigenic or immunogenic activity in an animal, preferably in a mammal and most preferably in a human. An epitope having immunogenic activity is a fragment of a polypeptide or protein that elicits an antibody response in an animal. An epitope having antigenic activity is a fragment of a polypeptide or protein to which an antibody or polypeptide specifically binds as determined by any method well-known to one of skill in the art, for example by immunoassays. Antigenic epitopes need not necessarily be immunogenic. Preferably, the term “epitope” as used herein refers to a polypeptide sequence of at least about 3 to 5, preferably about 5 to 10 or 15 and not more than about 1,000 amino acids (or any integer there between), which define a sequence that by itself or as part of a larger sequence, binds to an antibody generated in response to such sequence. There is no critical upper limit to the length of the fragment, which may comprise nearly the full-length of the protein sequence, or even a fusion protein comprising one or more epitopes. An epitope for use in the subject invention is not limited to a polypeptide having the exact sequence of the portion of the parent protein from which it is derived. Thus the term “epitope” encompasses sequences identical to the native sequence, as well as modifications to the native sequence, such as deletions, additions and substitutions (generally conservative in nature). The epitopes of protein antigens are divided into two categories, conformational epitopes and linear epitopes, based on their structure and interaction with the epitope binding site (Goldsby R et al., (2003) “Antigens (Chapter 3)” Immunology (Fifth edition ed.), New York: W. H. Freeman and Company. pp. 57-75, ISBN 0-7167-4947-5). A conformational epitope is composed of discontinuous sections of the antigen's amino acid sequence. These epitopes interact with the paratope based on the 3-D surface features and shape or tertiary structure of the antigen. Most epitopes are conformational. By contrast, linear epitopes interact with the paratope based on their primary structure. A linear epitope is formed by a continuous sequence of amino acids from the antigen.

[0146] The term “hetero-dimeric immunoglobulin” or “hetero-dimeric fragment” or “hetero-dimer” or “hetero-dimer of heavy chains” as used herein includes an immunoglobulin molecule or part of comprising at least a first and a second polypeptide, like a first and a second region, wherein the second polypeptide differs in amino acid sequence from the first polypeptide. Preferably, a hetero-dimeric immunoglobulin comprises two polypeptide chains, wherein the first chain has at least one non-identical region to the second chain, and wherein both chains assemble, i.e. interact through their non-identical regions. More preferably the hetero-dimeric immunoglobulin, has binding specificity for at least two different ligands, antigens or binding sites, i.e. is bispecific. Hetero-dimeric immunoglobulin as used herein includes but is not limited to full length bispecific antibodies, bispecifc Fab, bispecifc F(ab′)₂, bispecific scFv fused to an Fc region, diabody fused to an Fc region and domain antibody fused to an Fc region.

[0147] The term “homo-dimeric immunoglobulin” or “homo-dimeric fragment” or “homo-dimer” or “homo-dimer of heavy chains” as used herein includes an immunoglobulin molecule or part of comprising at least a first and a second polypeptide, like a first and a second region, wherein the second polypeptide is identical in amino acid sequence to the first polypeptide. Preferably, a homo-dimeric immunoglobulin comprises two polypeptide chains, wherein the first chain has at least one identical region to the second chain, and wherein both chains assemble, i.e. interact through their identical regions. Preferably, a homo-dimeric immunoglobulin fragment comprises at least two regions, wherein the first region is identical to the second region, and wherein both regions assemble, i.e. interact through their protein-protein interfaces.

[0148] For all immunoglobulin constant regions included in the present invention, numbering can be according to the IMGT® (IMGT®; supra).

[0149] For all human CH1, CH2, CH3 immunoglobulin heavy chain constant regions selected from the group consisting of IGHG1, IGHG2, IGHG3 and IGHG4, numbering can be according to the “EU numbering system” (Edelman G M et al., (1969) Proc Natl Acad Sci USA, 63(1): 78-85). A complete correspondence for the human CH1, hinge, CH2 and CH3 constant regions of IGHG1 can be found at the IMGT database (IMGT®; supra).

[0150] For the human kappa immunoglobulin light chain constant region (IGKC), numbering can be according to the “EU numbering system” (Edelman G M et al., supra). A complete correspondence for the human CK region can be found at IMGT database (IMGT®; supra).

[0151] For the human lambda immunoglobulin light chain constant regions (IGLC1, IGLC2, IGLC3, IGLC6 and IGLC7), numbering can be according to the “Kabat numbering system” (Kabat E A et al., supra). A complete correspondence for human IGLC regions can be found at the IMGT database (IMGT®; supra).

[0152] The human IGHG1 immunoglobulin heavy chain constant regions as referred to herein have the following region boundaries: CH1 region (EU numbering: 118-215), Hinge γ1 region (EU numbering: 216-230), CH2 region (EU numbering: 231-340) and CH3 region (EU numbering: 341-447). The human CK region referred herein spans residues 108 to 214 (EU numbering). The human IGLC1, IGLC2, IGLC3, IGLC6 and IGLC7 regions referred herein span residues 108-215 (Kabat numbering).

[0153] The terms “amino acid” or “amino acid residue” as used herein includes natural amino acids as well as non-natural amino acids. Preferably natural amino acids are included.

[0154] The term “modification” or “amino acid modification” herein includes an amino acid substitution, insertion and/or deletion in a polypeptide sequence. The terms “substitution” or “amino acid substitution” or “amino acid residue substitution” as used herein refers to a substitution of a first amino acid residue in an amino acid sequence with a second amino acid residue, whereas the first amino acid residue is different from the second amino acid residue i.e. the substituted amino acid residue is different from the amino acid which has been substituted. For example, the substitution R94K refers to a variant polypeptide, in which the arginine at position 94 is replaced with a lysine. For example 94K indicates the substitution of position 94 with a lysine. For the purposes herein, multiple substitutions are typically separated by a slash or a comma. For example, “R94K/L78V” or “R94K, L78V” refers to a double variant comprising the substitutions R94K and L78V. By “amino acid insertion” or “insertion” as used herein is meant the addition of an amino acid at a particular position in a parent polypeptide sequence. For example, insert−94 designates an insertion at position 94. By “amino acid deletion” or “deletion” as used herein is meant the removal of an amino acid at a particular position in a parent polypeptide sequence. For example, R94-designates the deletion of arginine at position 94.

[0155] In certain embodiments, the terms “decrease”, “reduce”, or “reduction” in binding to Protein A refers to an overall decrease of at least 25%, 30%, 40%, 50%, 60%, 70%, 80%, 85%, 90%, 95%, 97%, or 99% up to 100% (elimination) in the binding of a modified immunoglobulin or fragment thereof to Protein A detected by standard art known methods such as those described herein, as compared to a parental i.e. unmodified immunoglobulin or wild-type IgG or an IgG having the wild-type human IgG Fc region. In certain embodiments these terms alternatively may refer to an overall decrease of 10-fold (i.e. 1 log), 100-fold (2 logs), 1,000-fold (or 3 logs), 10,000-fold (or 4 logs), or 100,000-fold (or 5 logs).

[0156] The terms “eliminate”, “abrogate”, “elimination” or “abrogation” of binding to Protein A refers to an overall decrease of 100% in the binding of a modified immunoglobulin or fragment thereof to Protein A i.e. a complete loss of the binding of a modified immunoglobulin or fragment thereof to Protein A, detected by standard art known methods such as those described herein, as compared to a parental i.e. unmodified immunoglobulin or wild-type IgG or an IgG having the wild-type human IgG Fc region.

[0157] Similarly, the terms “decrease”, “reduce”, or “reduction” in binding to an affinity reagent refers to an overall decrease of at least 25%, 30%, 40%, 50%, 60%, 70%, 80%, 85%, 90%, 95%, 97%, or 99% up to 100% (elimination) in the binding of a modified immunoglobulin or fragment thereof to the affinity reagent detected by standard art known methods such as those described herein, as compared to a parental, i.e. unmodified immunoglobulin or wild-type IgG or an IgG having the wild-type human IgG Fc region. In certain embodiments these terms alternatively may refer to an overall decrease of 10-fold (i.e. 1 log), 100-fold (2 logs), 1,000-fold (or 3 logs), 10,000-fold (or 4 logs), or 100,000-fold (or 5 logs).

[0158] The terms “eliminate”, “abrogate”, “elimination” or “abrogation” of binding to an affinity reagent refers to an overall decrease of 100% in the binding of a modified immunoglobulin or fragment thereof to the affinity reagent i.e. a complete loss of the binding of a modified immunoglobulin or fragment thereof to the affinity reagent detected by standard art known methods such as those described herein, as compared to a parental, i.e. unmodified immunoglobulin or wild-type IgG or an IgG having the wild-type human IgG Fc region.

[0159] “Bispecific antibodies” are monoclonal antibodies that have binding specificities for at least two different antigens. In certain embodiments, the bispecific antibodies are bispecific antibodies with one or more amino acid modifications in the VH region relative to the parental antibody. In certain embodiments, bispecific antibodies may be human or humanized antibodies. Bispecific antibodies may also be used to localize cytotoxic agents to cells which express a target antigen. These antibodies possess a target-antigen-binding arm and an arm which binds a cytotoxic agent, such as, e.g., saporin, anti-interferon-α, vinca alkaloid, ricin A chain, methotrexate or radioactive isotope hapten. Bispecific antibodies can be prepared as full length antibodies or antibody fragments. Methods for making bispecific antibodies are known in the art. Traditionally, the recombinant production of bispecific antibodies is based on the co-expression of two immunoglobulin heavy chain-light chain pairs, where the two heavy chains have different specificities (Milstein and Cuello, (1983) Nature, 305: 537-40). Because of the random assortment of immunoglobulin heavy and light chains, these hybridomas (quadromas) produce a potential mixture of different antibody molecules, of which only one has the correct bispecific structure. The purification of the correct molecule, which is usually done by affinity chromatography steps, is rather cumbersome and the product yields are low. Similar procedures are disclosed in WO1993/08829 and in Traunecker et al., (1991) EMBO J, 10: 3655-9. According to a different approach, antibody variable regions with the desired binding specificities (antibody-antigen combining sites) are fused to immunoglobulin constant region sequences. The fusion, for example, is with an immunoglobulin heavy chain constant region, comprising at least part of the hinge, CH2 and CH3 regions. In certain embodiments, the first heavy-chain constant region (CH1), containing the site necessary for light chain binding, is present in at least one of the fusions. DNAs encoding the immunoglobulin heavy chain fusions and, if desired, the immunoglobulin light chain, are inserted into separate expression vectors and are co-transfected into a suitable host organism. This provides for flexibility in adjusting the mutual proportions of the three polypeptide fragments in embodiments when unequal ratios of the three polypeptide chains used in the construction provide the optimum yields. It is, however, possible to insert the coding sequences for two or all three polypeptide chains in one expression vector when the expression of at least two polypeptide chains in equal ratios results in high yields or when the ratios are of no particular significance.

[0160] Bispecific antibodies include cross-linked or “heteroconjugate” antibodies. For example, one of the antibodies in the heteroconjugate can be coupled to avidin, the other to biotin. Such antibodies have, for example, been proposed to target immune system cells to unwanted cells (U.S. Pat. No. 4,676,980) and for treatment of HIV infection (WO1991/00360, WO1992/00373 and EP03089). Heteroconjugate antibodies may be made using any convenient cross-linking method. Suitable cross-linking agents are well known in the art (see U.S. Pat. No. 4,676,980), along with a number of cross-linking techniques. Antibodies with more than two valencies are also contemplated. For example, trispecific antibodies can be prepared (see Tutt A et al. (1991) J. Immunol. 147: 60-9).

[0161] In some embodiments the present disclosure provides a bispecific hetero-dimeric immunoglobulin or fragment thereof or a bispecific full-length antibody which binds to CD3 and a disease associated antigens selected from within the groups of: tumor antigens, cytokines, vascular growth factors and lympho-angiogenic growth factors. Preferably the bispecific hetero-dimeric immunoglobulin or fragment thereof or the bispecific antibody binds to CD3 and a disease associated antigen selected from the group consisting of: CCR3, CCR6, CRTH2, PDL1, BLUT1, PirB, CD33, TROP2, CD105, GD2, GD3, CEA, VEGFR1, VEGFR2, NCAM, CD133, CD123, ADAM17, MCSP, PSCA, FOLR1, CD19, CD20, CD38, EpCAM, HER2, HER3, EGFR, PSMA, IgE, Integrin a4b1, CCR5, LewisY, FAP, MUC-1, Wue-1, MSP, EGFRvIII, P glycoprotein, AFP, ALK, BAGE proteins, CD30, CD40, CTLA4, ErbB3, ErbB4, Mesothelin, OX40, CA125, CAIX, CD66e, cMet, EphA2, HGF/SF, MUC1, Phosphatidylserine, TAG-72, TPBG, β-catenin, brc-abl, BRCA1, BORIS, CA9, caspase-8, CDK4, Cyclin-B1, CYP1B1, ETV6-AML, Fra-1, FOLR1, GAGE-1, GAGE-2, GloboH, glypican-3, GM3, gp100, HLA/B-raf, HLA/k-ras, HLA/MAGE-A3, hTERT, LMP2, MAGE1, MAGE2, MAGE3, MAGE4, MAGE6, MAGE12, MART-1, ML-IAP, Muc2, Muc3, Muc4, Muc5, Muc16, MUM1, NA17, NY-BR1, NY-BR62, NY-BR-85, NY-ESO1, p15, p53, PAP, PAX3 PAXS, PCTA-1, PLAC1, PRLR, PRAME, RAGE proteins, Ras, RGS5, Rho, SART-1, SART-3, Steap-1, Steap-2, survivin, TAG-72, TGF-β, TMPRSS2, Tn, TRP-1, TRP-2, tyrosinase, uroplakin-3, PSMA. Preferably the bispecific hetero-dimeric immunoglobulin or fragment thereof or the bispecific antibody binds to CD3 and HER2 or CD3 and CD38 or CD3 and OX40 or CD3 and CD19 or CD3 and CD20 or CD3 and Erbitux or CD3 and Vectibix.

[0162] Protein A:

[0163] Protein A is a cell wall component produced by several strains of Staphylococcus aureus which consists of a single polypeptide chain. The Protein A gene product consists of five homologous repeats attached in a tandem fashion to the pathogen's cell wall. The five domains are approximately 58 amino acids in length and denoted EDABC, each exhibiting immunoglobulin binding activity (Tashiro M & Montelione G T (1995) Curr. Opin. Struct. Biol., 5(4): 471-481). The five homologous immunoglobulin binding domains fold into a three-helix bundle. Each domain is able to bind proteins from many mammalian species, most notably IgGs (Hober S et al., (2007) J. Chromatogr. B Analyt. Technol. Biomed. Life Sci., 848(1): 40-47). Protein A binds the heavy chain of most immunoglobulins within the Fc region but also within the Fab region in the case of the human VH3 family (Jansson B et al, (1998) FEMS Immunol. Med. Microbiol., 20(1): 69-78). Protein A binds IgG from various species including human, mouse, rabbit and guinea pig but does not bind human IgG3 (Hober S et al., (2007) supra). The inability of human IgG3 to bind Protein A can be explained by the H435R and Y436F substitutions in the human IgG3 Fc region (EU numbering, Jendeberg et al., (1997) J. Immunol. Methods, 201(1): 25-34). Besides IgG, Protein A also interacts with IgM and IgA.

[0164] Amongst human VH subclasses, VH3 is the only subclass to bind Protein A (Graille M et al., (2000) Proc. Natl. Acad. Sci. USA 97(10): 5399-5404), and all five domains of Protein A are known to bind this variable domain subclass (Jansson B et al, (1998) FEMS Immunol. Med. Microbiol., 20(1): 69-78. VH3 based immunoglobulins or fragments thereof are of major importance to the biotechnology industry. VH3 based molecules have been extensively developed since their ability to bind Protein A facilitates their functional pre-screening, and as such many synthetic or donor based phage display libraries or transgenic animal technologies used for antibody discovery are based on the VH3 subclass. In addition VH3 based molecules are often selected for their good expression and stability over other known heavy chain variable domain subclasses.

[0165] The capacity of Protein A to bind antibodies with such high affinity is the driving motivation for its industrial scale use in biologic pharmaceuticals. Protein A used for production of antibodies in bio-pharmaceuticals is usually produced recombinantly in E. coli and functions essentially the same as native Protein A (Liu H F et al., (2010) MAbs, 2(5): 480-499). Most commonly, recombinant Protein A is bound to a stationary phase chromatography resin for purification of antibodies. Optimal binding occurs at pH8.2, although binding is also good at neutral or physiological conditions (pH 7.0-7.6). Elution is usually achieved through pH shift towards acidic pH (glycine-HCl, pH2.5-3.0). This effectively dissociates most protein-protein and antibody-antigen binding interactions without permanently affecting protein structure. Nevertheless, some antibodies and proteins are damaged by low pH and it is best to neutralize immediately after recovery by addition of 1/10th volume of alkaline buffer such as 1 M Tris-HCl, pH 8.0 to minimize the duration of time in the low-pH condition.

[0166] There are various commercially available Protein A chromatography resins. The main differences between these media are the support matrix type, Protein A ligand modification, pore size and particle size. The differences in these factors give rise to differences in compressibility, chemical and physical robustness, diffusion resistance and binding capacity of the adsorbents (Hober S et al., (2007), supra). Examples of Protein A chromatography resins include but are not limited to the MabSelect SuRe™ Protein A resin and MabSelect™ Protein A resin from GE Healthcare as used in examples.

[0167] The term “chromatography” refers to protein liquid chromatography and includes fast protein liquid chromatography (FPLC) which is a form of liquid chromatography that is often used to analyze or purify mixtures of proteins. As in other forms of chromatography, separation is possible because the different components of a mixture have different affinities for two materials, a moving fluid (the mobile phase) which passes through a porous solid (the stationary phase). In FPLC, the mobile phase is an aqueous solution, or “buffer”. The buffer flow rate can be operated under gravity flow or controlled by a positive-displacement pump which is normally kept at a constant rate, while the composition of the buffer can be varied by drawing fluids in different proportions from two or more external reservoirs. The stationary phase is a resin composed of beads, usually of cross-linked agarose, packed into a cylindrical glass or plastic column. FPLC resins are available in a wide range of bead sizes and surface ligands depending on the application.

[0168] The process of “affinity chromatography” involves the use of an affinity reagent as ligands which are cross-linked to the stationary phase and that have binding affinity to specific molecules or a class of molecules. Ligands can be bio-molecules, like protein ligands or can be synthetic molecules. Both types of ligand tend to have good specificity. The most commonly used protein ligand in production is the affinity reagent Protein A. In affinity chromatography when the solution (for example a crude cell supernatant containing a protein of interest) is loaded onto to the column the target protein is usually adsorbed while allowing contaminants (other proteins, lipids, carbohydrates, DNA, pigments, etc.) to pass through the column. The adsorbent itself is normally packed in a chromatography column; though the adsorption stage can be performed by using the adsorbent as a stirred slurry in batch binding mode. The next stage after adsorption is the wash stage, in which the adsorbent is washed to remove residual contaminants. The bound protein is then eluted in a semi-pure or pure form. Elution is normally achieved by changing the buffer or salt composition so that the protein can no longer interact with the immobilized ligand and is released. In some instances the protein of interest may not bind the affinity resin and affinity chromatography is directed at binding unwanted contaminants and the unbound fraction is therefore collected to isolate the protein of interest. Affinity chromatography can be performed in a fixed bed or a fluidised bed.

[0169] The term “gradient mode chromatography” refers to a chromatography method wherein the proportion of the “elution” buffer (buffer B) is increased from 0% to 100% in a gradual or stepwise manner.

[0170] The terms “capture-elution mode chromatography” or “capture-elution purification mode” or “capture-elution purification” refers to a chromatography method wherein the proportion of the “elution” buffer (buffer B) is not increased from 0% to 100% in a gradual or stepwise manner but rather directly applied at a 100% after capture and optionally a wash step with running buffer (buffer A).

### Development of Hetero-Dimeric Immunoglobulins Targeting CD3

[0171] The present invention provides an epitope binding region that binds the CD3 protein complex comprising the heavy and light chain CDRs as described supra and further comprising a heavy chain variable framework region that is the product of or derived from human gene IGHV3-23*04 (SEQ ID NO: 22). The heavy chain variable framework region comprises at least one amino acid modification from the corresponding framework region of the heavy chain variable region of the corresponding murine antibody OKT3 comprising the amino acid sequence of SEQ ID NO: 18. Preferably the amino acid modification is an amino acid substitution. Typically, no more than seven, preferably no more than six, preferably no more than five, preferably no more than four, more preferably no more than three, even more preferably no more than two, most preferably no more than one amino acid modifications are performed within a framework region. In some embodiments the present disclosure provides an epitope binding region that binds to the CD3 protein complex, wherein the amino acid modification of the framework regions of the heavy chain variable region comprise an amino acid substitution at amino acid position selected from the group consisting of: 34, 48, 49, 58, 69, 71 and 73 and wherein the amino acid position of each group member is indicated according to the Kabat numbering. Preferably, amino acid substitutions of the framework regions of the heavy chain variable region are selected from the group consisting of: I34M, V48I, A49G, R58N, R58Y, I69L, A71T and T73K. Preferred amino acid substitution of the framework regions of the heavy chain variable region are at amino acid positions selected from the group consisting of 34, 49 and 71. More preferred amino acid substitutions of the framework regions of the heavy chain variable region are selected from the group consisting of I34M, A49G and A71T.

[0172] In a further aspect, the epitope binding region of the first polypeptide that binds the CD3 protein complex comprises a light chain variable framework region that is the product of or derived from a human gene selected from the group consisting of: IGKV1-39*01 (SEQ ID NO: 23) and IGKV3-20*01 (SEQ ID NO: 24). The light chain variable framework region comprises at least one amino acid modification from the corresponding framework region of the light chain variable region of the corresponding murine antibody OKT3 comprising the amino acid sequence of SEQ ID NO: 19. Preferably the amino acid modification is an amino acid substitution. Typically, no more than eight, preferably no more than seven, preferably no more than six, preferably no more than five, preferably no more than four, more preferably no more than three, even more preferably no more than two, most preferably no more than one amino acid modifications are performed within a framework region. In some embodiments the present disclosure provides an epitope binding region that binds to the CD3 protein complex, wherein the amino acid modification of the framework regions of the light chain variable region sequence comprises an amino acid substitution at amino acid position selected from the group consisting of: 4, 33, 34, 46, 47, 66, 71 and 96. Preferably, amino acid substitutions of the framework regions of the light chain variable region are selected from the group consisting of: M4L, V33M, A34N, L46R, L47W, R66G, F71Y and P96F. Preferred amino acid substitution of the framework regions of the light chain variable region are at amino acid positions selected from the group consisting of 4, 46 and 47. More preferred amino acid substitutions of the framework regions of the light chain variable region are selected from the group consisting of M4L, L46R, L47W and F71Y. In some embodiments the epitope binding region of the first polypeptide that binds to the CD3 protein complex may comprise amino acid modifications of the framework regions of the heavy chain variable region sequence as set out above and amino acid modifications of the framework regions of the light chain variable region sequence as set out above.

[0173] The present disclosure also provides an antibody or fragment thereof that binds to the CD3 protein complex that comprises a heavy chain sequence selected from the group consisting of SEQ ID NOs: 27 to 38, 64-68 and 359, preferably selected consisting of SEQ ID NO: 359.

[0174] The present disclosure also provides an antibody or fragment thereof that binds to the CD3 protein complex that comprises a light chain sequence selected from the group consisting of SEQ ID NOs: 39 to 47, 69 to 90 360, 399 and 400 preferably consisting of SEQ ID NO: 360.

[0175] Given that each of these heavy and light chain variable region sequences can bind to the CD3 protein complex, the heavy and light chain variable region sequences can be “mixed and matched” to create anti-CD3 binding molecules of the invention. CD3 binding of such “mixed and matched” antibodies can be tested using the binding assays described e.g. in the Examples.

### Engineering of the Immunoglobulin Constant Region to Promote Hetero-Dimer Formation Over Homo-Dimer Formation

[0176] Methods to produce hetero-dimeric immunoglobulins are known in the art and one of the simplest methods relies on expressing the two distinct immunoglobulin chains in a single cell (WO95/33844, Lindhofer H & Thierfelder S). Without engineering, this straightforward method is limited by the formation of homo-dimeric species over the hetero-dimer of interest (Kufer P et al., (2004) Trends Biotechnol., 22(5): 238-244). When using complementary technologies that will enhance heavy chain hetero-dimerization (Merchant A M et al., (1998) Nat. Biotechnol., 16(7): 677-681), greater hetero-dimer production can be achieved but still results in the production of a significant amount of undesirable homo-dimers (Jackman J et al., (2010) J Biol Chem., 285(27):20850-9, Klein C et al., (2012) MAbs, 4(6):653-63). The present invention therefore utilises the BEAT® technology described method (PCT publication No: WO2012/131555), which is based on a unique concept of bio-mimicry that exhibit superior hetero-dimerisation over prior art methods. The BEAT technology is based on an interface exchange between naturally occurring homo or hetero-dimeric immunoglobulin domain pairs to create new hetero-dimers which can be used as building blocks for Fc-based bispecific antibodies.

[0177] In one aspect, the present invention provides a hetero-dimeric immunoglobulin or fragment thereof comprising first and second polypeptides comprising an engineered immunoglobulin constant region with a modified CH3 domain having a protein-protein interface, wherein the protein-protein interface of the first polypeptide comprises an amino acid substitution at a position selected from the group consisting of: 3, 5, 7, 20, 22, 26, 27, 79, 81, 84, 84.2, 85.1, 86, 88 and 90 (IMGT® numbering), and wherein the protein-protein interface of the second polypeptide comprises an amino acid substitution at position 84.4 and at a position selected from the group consisting of 3, 5, 7, 20, 22, 26, 27, 79, 81, 84, 84.2, 85.1, 86, 88 and 90 (IMGT® numbering).

[0178] In a further embodiment, the present invention provides a hetero-dimeric immunoglobulin or fragment thereof, wherein the first and second polypeptides comprise an engineered immunoglobulin constant region with a modified CH3 domain having a protein-protein interface, wherein the protein-protein interface of the first polypeptide comprises an amino acid substitution at position 88 and at a position selected from the group consisting of: 3, 5, 7, 20, 22, 26, 27, 79, 81, 84, 84.2, 85.1, 86 and 90 (IMGT® numbering), and wherein the protein-protein interface of the second polypeptide comprises an amino acid substitution at position 85.1 and/or 86 and at a position selected from the group consisting of 3, 5, 7, 20, 22, 26, 27, 79, 81, 84, 84.2, 84.4, 88 and 90 (IMGT® numbering), wherein the amino acid residue substituted at position 88 in the first engineered immunoglobulin constant region is interacting with the amino acid residue substituted at position 85.1 and/or 86 in the second engineered immunoglobulin constant region, wherein the amino acid position of each group member is indicated according to the IMGT® numbering.

[0179] Preferably the amino acid residue which is substituted in the protein-protein interface of the first engineered immunoglobulin constant region at position 88 is 88W and conservative amino acid substitutions thereof, wherein the amino acid position is indicated according to IMGT® numbering. More preferably, the amino acid residue which is substituted in the protein-protein interface of the first engineered immunoglobulin constant region at position 88 is 88W and wherein the further amino acid residue substituted in the protein-protein interface of the first engineered immunoglobulin constant region is selected from the group consisting of: 3A, 20V, 20T, 20A, 20N, 20Q, 20E, 20S, 20K, 20W, 22A, 22G, 22T, 22L, 22I, 22V, 26R, 26Q, 26T, 26K, 26V, 26S, 26N, 26E, 79Y, 85.1T, 85.1M, 85.1A, 85.1S, 85.1R, 85.1H, 85.1K, 85.1F, 85.1C, 85.1N, 85.1W, 86S, 86I, 86T, 86H, 86Q, 86V, 86W, 86Y, 86F and 90N, wherein the amino acid position is indicated according to the IMGT® numbering.

[0180] Preferably the amino acid residue which is substituted at position 85 and 86 in the protein-protein interface of the second engineered immunoglobulin constant region is selected from the group consisting of: 85.1A, 85.15, 85.1C and 86S and conservative amino acid substitutions thereof (IMGT® numbering). More preferably the amino acid residue which is substituted in the protein-protein interface of the second engineered immunoglobulin constant region is selected from the group consisting of: 85.1A, 85.1S, 85.1C and 86S and wherein the further amino acid residue substituted in the protein-protein interface of the second engineered immunoglobulin constant region is selected from the group consisting of: 3E, 5A, 7F, 20T, 22V, 26T, 81D, 84L, 84.2E, 88R and 90R and conservative amino acid substitutions thereof (IMGT® numbering).

[0181] In a preferred embodiment the amino acid residue which is substituted in the protein-protein interface of the first engineered immunoglobulin constant region at position 88 is 88W and wherein the further amino acid residue substituted in the protein-protein interface of the first engineered immunoglobulin constant region is: 3A, 20K, 22V, 26T, 79Y, 85.1S, 86V and 90N and, wherein the amino acid residues which are substituted in the protein-protein interface of the second engineered immunoglobulin constant region at positions 85.1 and 86 are 85.1A, 85.1S or 85.1A and 86S and wherein the further amino acid residue substituted in the protein-protein interface of the second engineered immunoglobulin constant region is: 3E, 5A, 7F, 20T, 22V, 26T, 81D, 84L, 84.2E, 84.4Q, 88R and 90R (IMGT® numbering).

[0182] In an alternative embodiment, the present invention provides a hetero-dimeric immunoglobulin or fragment thereof, wherein the first and second polypeptides comprise an engineered immunoglobulin constant region with a modified CH3 domain having a protein-protein interface, wherein the protein-protein interface of the first polypeptide comprises an amino acid substitution at position 20, and at a position selected from the group consisting of: 3, 5, 7, 22, 26, 27, 79, 81, 84, 84.2, 85.1, 86, 88 and 90 and, wherein the protein-protein interface of the second polypeptide comprises an amino acid substitution at position 26 and at a position selected from the group consisting of: 3, 22, 27, 79, 81, 84, 85.1, 86, and 88, wherein the amino acid residue substituted at position 20 in the first engineered immunoglobulin constant region is interacting with the amino acid residue substituted at position 26 in the second engineered immunoglobulin constant region,

wherein the amino acid position of each group member is indicated according to the IMGT® numbering.

[0183] Preferably the amino acid residues which are substituted in the protein-protein interface of the first engineered immunoglobulin chain comprise the amino acid residues at positions 20 and 22, and optionally a further amino acid residue at a position selected from the group consisting of: 3, 5, 7, 26, 27, 79, 81, 84, 84.2, 84.4, 85.1, 86, 88 and 90 and, wherein the amino acid residues which are substituted in the protein-protein interface of the second engineered immunoglobulin chain comprise the amino acid residues at positions 26 and at a further position selected from the group consisting of: 3, 5, 7, 20, 22, 27, 79, 81, 84, 84.2, 84.4, 85.1, 86, 88 and 90, wherein the amino acid position of each group member is indicated according to the IMGT® numbering. Preferably the amino acid residues which are substituted in the protein-protein interface of the first engineered immunoglobulin chain comprise the amino acid residues at positions 20 and 22, and optionally a further amino acid residue at a position selected from the group consisting of: 3, 5, 7, 26, 27, 79, 81, 84, 84.2, 84.4, 85.1, 86, 88 and 90 and, wherein the amino acid residues which are substituted in the protein-protein interface of the second engineered immunoglobulin chain comprise the amino acid residues at positions 26 and 86 and optionally at a further position selected from the group consisting of 3, 5, 7, 20, 22, 27, 79, 81, 84, 84.2, 84.4, 85.1, 88 and 90, wherein the amino acid position of each group member is indicated according to the IMGT® numbering.

[0184] More preferably the amino acid residue which is substituted at position 20 in the protein-protein interface of the first engineered immunoglobulin constant region is selected from the group consisting of 20V, 20T, 20A, 20N, 20Q, 20K, 20S, 20W and 20E and wherein the further amino acid residue substituted in the protein-protein interface of the first engineered immunoglobulin constant region is selected from the group consisting of 3A, 22A, 22G, 22L, 22I, 22V, 22T, 26K, 26R, 26Q, 26T, 26V, 26S, 26N, 26E, 79Y, 85.1W, 85.1F, 85.1T, 85.1M, 85.1A, 85.1S, 85.1R, 85.1H, 85.1K, 85.1C, 85.1N, 86W, 86Y, 86S, 86I, 86H, 86Q, 86V, 86T, 86F, 88Q, 88L, 88V, 88R, 88E, 88T, 881, 88Y, 88K, 88W and 90N, and wherein the amino acid residue which is substituted at position 26 in the protein-protein interface of the second engineered immunoglobulin constant region is selected from the group consisting of 26T and 26E and conservative amino acid substitutions thereof, wherein the amino acid position is indicated according to the IMGT® numbering.

[0185] In a most preferred embodiment the amino acid residue which is substituted in the protein-protein interface of the first engineered immunoglobulin constant region at position 20 is 20K and wherein the further amino acid residue substituted in the protein-protein interface of the first engineered immunoglobulin constant region is 3A, 22V, 26T, 79Y, 85.1S, 86V, 88W and 90N and, wherein the amino acid residues which are substituted in the protein-protein interface of the second engineered immunoglobulin constant region at position 26 is 26T and wherein the further amino acid residue substituted in the protein-protein interface of the second engineered immunoglobulin constant region is 3E, 5A, 7F, 20T, 22V, 81D, 84L, 84.2E, 84.4Q, 85.1C/S/A, 86S, 88R and 90R (IMGT® numbering).

### Development of Hetero-Dimeric Immunoglobulins Targeting CD3 and a Disease Associated Antigen

[0186] As a first step (Example 1), the substitutions that reduce or abrogate binding to Protein A were assayed in homo-dimeric immunoglobulins based on FAB or scFv fragments. It was found that the presence of a variable heavy chain domain of the VH3 subclass within the heavy chain which has substitutions for reduced or no binding to Protein A, hampers any differential affinity methods based on Protein A. Solutions to these major impediments were found in the forms of framework substitutions that reduce or abrogate Protein A binding to the VH3 subclass for the differential affinity methods based on Protein A.

[0187] In a second step (Example 2.1), a humanised antibody targeting the human CD3 (epsilon subunit) was generated by grafting the CDRs of a murine anti-CD3 antibody onto IGVH3-23 and IGVK1 or IGVK3 human germline frameworks. The best humanised variants had the Protein A binding site present in their VH domain abrogated using a G65S or N82aS substitution (Kabat numbering). These variants were formatted as FAB or scFv fragments.

[0188] In a third step, antigen binding sites of antibodies targeting disease associated antigens were generated. CDRs of murine antibodies could be grafted onto the human germline frameworks IGVH3-23 and IGVK1 (Examples 2.3, 2.4 and 2.6-2.10). Alternatively CDRs of antibodies isolated from phage display libraries could be based on the VH3 variable domain subclass or grafted onto the human germline frameworks IGVH3-23 and IGVK1 (Examples 2.5 and 2.6). The Protein A binding site in the VH domain of the epitope binding region was abrogated using the G65S or N82aS substitutions (Kabat numbering).

[0189] In a fourth step, hetero-dimeric antibodies were produced based on the BEAT® technology (as described in WO2012/131555) in which the anti-CD3 antibody from Example 2.1 2 2 and the epitope binding region of the disease associated antigen as described in Examples 2.2-2.10 were used in an scFv-FAB format or vice versa (Example 3.1). Since a difference in the number of Protein A binding sites between homo- and hetero-dimeric species can be used to isolate the hetero-dimeric species by Protein A chromatography, the bispecific antibodies of the present invention were engineered to result in one of the two homo-dimeric species having no Protein A binding site and therefore no binding to Protein A resin. Furthermore, in order to improve the safety profile of the BEAT antibodies, the Fc receptor binding was reduced or eliminated by engineering the two substitutions L234A and L235A (EU numbering) into the lower hinge region of the Fc region.

### EXAMPLES

### Materials and Methods

### Construction of Expression Vectors for Transient Mammalian Cell Expression

[0190] cDNAs encoding the different polypeptide chains in part or in full were first gene synthesized by GENEART AG (Regensburg, Germany) and modified using standard molecular biology techniques. PCR products were digested with appropriate DNA restriction enzymes, purified and ligated in a modified pcDNA3.1 plasmid (Invitrogen AG, Zug, Switzerland) carrying a CMV promoter and a bovine hormone poly-adenylation (poly(A)) previously digested with the same DNA restriction enzymes. All polypeptide chains were independently ligated in this expression vector where secretion was driven by the murine VJ2C leader peptide.

### Expression of Recombinant Proteins

[0191] Antibodies, ScFv-Fc fusion proteins, BEAT antibodies and antigens were expressed as described below unless otherwise indicated. For transient expression, equal quantities of each engineered chains vectors were co-transfected into suspension-adapted HEK293-EBNA cells (ATCC-LGL standards, Teddington, UK; Cat. No: CRL-10852) using Polyethyleneimine (PEI; Sigma, Buchs, Switzerland). Typically, 100 ml of cells in suspension at a density of 0.8-1.2 million cells per ml is transfected with a DNA-PEI mixture. When recombinant expression vectors encoding each engineered chain genes are introduced into the host cells, the immunoglobulin construct is produced by further culturing the cells for a period of 4 to 5 days to allow for secretion into the culture medium (EX-CELL 293, HEK293-serum-free medium (Sigma), supplemented with 0.1% pluronic acid, 4 mM glutamine and 0.25 μg/ml geneticin). Cell-free culture supernatants containing the secreted immunoglobulins were prepared by centrifugation followed by sterile filtration and used for further analysis.

### Differential Protein A Affinity Chromatography (Example 1)

[0192] Purification of Fc 133 Fragment and Homo-Dimeric scFv-Fc Immunoglobulins

### Capture-Elution Mode Chromatography

[0193] Supernatants were conditioned with 0.1 volume (V) of 1M Tris-HCl pH 8.0 prior purification. Protein G Sepharose™ 4 Fast Flow (GE Healthcare Europe GmbH, Glattbrugg, Switzerland; catalogue number 17-0618-01) was added to conditioned supernatants. Mixtures were incubated overnight at 4° C. After incubation, bound proteins were washed with 10 CVs of PBS pH 7.4, eluted with 4 column volumes (CVs) of 0.1M Glycine pH 3.0 and neutralised with 0.1V of 1M Tris-HCl pH8.0. Supernatant, flow through and elution fractions were analysed under non-reduced conditions by SDS-PAGE (NuPAGE Bis-Tris 4-12% acrylamide, Invitrogen AG, Basel, Switzerland).

### Gradient Mode Chromatography

[0194] Post production, cell-culture supernatants containing the Fc 133 fragment were first purified in capture-elution mode chromatography using Protein G Sepharose™ 4 Fast Flow (above). Eluted material from capture-elution mode chromatography were subsequently loaded onto a 1 ml HiTrap™ MabSelect SuRe™ Protein A column (Protein A binding site mutants). The column was pre-equilibrated in 0.2M phosphate citrate buffer pH 8.0 and operated on an ÄKTApurifier™ chromatography system (both column and instrument from GE Healthcare Europe GmbH; column catalogue No: 11-0034-93) at a flow rate of 1 ml/min. Elution was performed with a pH linear gradient combining various amounts of two buffers (running buffer (A): 0.2M phosphate citrate buffer pH 8.0 and elution buffer (B): 0.04M phosphate citrate buffer pH 3.0. The linear gradient went from 0% B to 100% B in five column volumes (CVs). Eluted fractions were neutralised with 0.1V of 1M Tris-HCl pH 8.0. Supernatant, flow through and elution fractions were analysed under non-reduced conditions by SDS-PAGE (NuPAGE Bis-Tris 4-12% acrylamide, Invitrogen AG, Basel, Switzerland).

### Purification of Homo-Dimeric FAB-Fc Immunoglobulins and FAB Fragments.

[0195] Post production, cell culture supernatants were conditioned with 0.1V of 1M Tris-HCl pH 8.0. Protein L resin (Genescript, Piscataway, USA) was added to the conditioned supernatant and incubated overnight at 4° C. After incubation, bound proteins were washed with ten CVs of PBS pH7.4, eluted with 4 CVs of 0.1M Glycine pH 3.0, and finally neutralised with 0.1V of 1M Tris-HCl pH 8.0. To assess Protein A binding, Protein L purified FAB were injected on a 1 ml HiTrap MabSelect™ column (GE Healthcare Europe GmbH, Glattbrugg, Switzerland) at pH8.0 (Citric acid/Na₂HPO₄ buffer). Elution was performed with a pH linear gradient combining various amounts of two buffers (running buffer (A): 0.2 M phosphate citrate buffer pH8.0 and elution buffer (B): 0.04 M phosphate citrate buffer pH3.0). The linear gradient went from 0% B to 100% B in 5 CVs. Eluted fractions were neutralised with 0.1V of 1M Tris-HCl pH8.0. Supernatant, flow through and elution fractions were analysed under non-reduced conditions by SDS-PAGE (NuPAGE Bis-Tris 4-12% acrylamide, Invitrogen AG, Basel, Switzerland).

Purification and Testing of VH3 Based Homo-Dimeric FAB-Fc and scFv-Fc Immunoglobulins Abrogated for Protein a Binding in their Fc and VH3 Domains.

[0196] Purification scheme included a capture-elution mode chromatography followed by a gradient mode chromatography according to the procedure described above.

### Differential Protein a Affinity Chromatography (Examples 1 & 3)

[0197] Post production, cell-free supernatants were loaded onto a 1 ml HiTrap™ MabSelect SuRe™ Protein A column pre-equilibrated in 0.2M phosphate citrate buffer pH 6.0 and operated on an ÄKTApurifier™ chromatography system (both from GE Healthcare Europe GmbH; column Cat. No: 11-0034-93) at a flow rate of 1 ml/min. Running buffer was 0.2 M phosphate citrate buffer pH 6. Elution of the hetero-dimer of interest was performed using 20 mM sodium citrate buffer pH 4 whilst homo-dimeric species were eluted with 0.1 M glycine, pH3.0. Elution was followed by OD reading at 280 nm; fraction containing the hetero-dimer of interest were pooled and neutralized with 0.1 volume of 1M Tris pH 8.0 (Sigma).

[0198] Supernatant, flow through and elution fractions were analysed under non-reduced conditions by SDS-PAGE (NuPAGE Bis-Tris 4-12% acrylamide, Invitrogen AG, Basel, Switzerland).

### Differential Scanning Calorimetry (DSC)

[0199] The thermal stabilities of antibodies were compared using calorimetric measurements. calorimetric measurements were carried out on a VP-DSC differential scanning microcalorimeter (MicroCal-GE Healthcare Europe GmbH, Glattbrugg, Switzerland). The cell volume was 0.128 ml, the heating rate was 1° C./min and the excess pressure was kept at 64 p.s.i. All protein fragments were used at a concentration of 1-0.5 mg/ml in PBS (pH 7.4). The molar heat capacity of each protein was estimated by comparison with duplicate samples containing identical buffer from which the protein had been omitted. The partial molar heat capacities and melting curves were analysed using standard procedures. Thermograms were baseline corrected and concentration normalized before being further analysed using a Non-Two State model in the software Origin v7.0.

[0200] The expected melting profiles for the human IgG subclasses are known (Garber E & Demarest S J (2007) Biochem Biophys Res Commun, 355(3): 751-7) and all profiles have been shown to contain three unfolding transitions corresponding to the independent unfolding of the CH2, CH3 and FAB domains. Of the four human IgG subclasses, IGHG1 has the most stable CH3 domain (˜85° C.); while other subclasses CH3 domains are less stable, although none are known to melt below 70° C. Similarly, all subclasses are known to have a melting temperature of ˜70° C. for the CH2 domain.

### Purity Assessment by Capillary Gel Electrophoresis (Example 3.2)

### Non-Reduced Sample Preparation

[0201] 40 μg of desalted protein sample was buffered in SDS sample buffer (Beckman Coulter International S.A., Nyon, Switzerland; IgG Purity Kit, Cat. No: A10663) containing 5 mM Iodoacetamide (Sigma). A 10-kDa internal standard was added to the samples. The sample-mixtures were heated at 70° C. for 10 min.

### Capillary Gel Electrophoresis

[0202] Following sample preparation, samples were run on a ProteomeLab PA 800 (Beckman Coulter International S.A., Nyon, Switzerland) fitted with a photodiode array detector (DAD) set at 220 nm. Bare-fused silica capillaries of 50 μm ID×30.2 cm (20.2 cm effective length to detector) were used as separation medium. Sample injection and separation were performed at constant voltages of 5 and 15 kV, respectively, with reverse polarity in SDS-molecular weight gel buffer. The data were recorded at a rate of 2 Hz and current was stable during separation. Capillary and samples were thermo-stated at 25° C.

### Affinity Measurements by SPR (Example 1)

### SPR Testing of FAB Fragments Abrogated for Protein a Binding

[0203] cDNA encoding the human HER2 extracellular region fused to an IGHG1 Fc fragment was cloned into an expression vector similar to the heavy and light expression vectors described above and transiently transfected in HEK293E cells using the PEI method (see PCT Publication No: WO2012131555). Supernatants were conditioned with 0.1V of 1 M Tris-HCl pH8.0 and the antigen purified by Protein A capture-elution chromatography as described in Example 1. For SPR experiments, a monoclonal mouse anti-human IgG (Fc) antibody sensor chip was used, this allowed for the capture the Fc fused recombinant HER2 antigen in the correct orientation (Human Antibody Capture Kit, catalogue number BR-1008-39, GE Healthcare Europe GmbH). Measurements were recorded on a BIAcore™ 2000 instrument (GE Healthcare Europe GmbH, Glattbrugg, Switzerland). Different dilutions of anti-HER2 FAB (50, 25, 12.5, 6.25, 3.13, 1.57, 0.78, 0.39 nM) were injected over the sensor chip for 4 min at 30 μl/min. For each measurement, after seven minutes of dissociation, a 3M MgCl₂ solution was injected for 1 min at 30 μl/min for regeneration. Data (sensorgram: fc2-fc1) were fitted with a 1:1 Langmuir. To account for the experimental variations in captured HER2-Fc at the beginning of each measurement, the Rmax value was set to local in all fits. Measurements were performed in duplicate, and included zero-concentration samples for referencing. Both Chi2 and residual values were used to evaluate the quality of a fit between the experimental data and individual binding models

### Affinity Measurements by SPR (Examples 2 & 3)

[0204] SPR analysis was used to measure the association and dissociation rate constants for the binding kinetics of the different antibodies (murine and humanized antibodies). The binding kinetics of antibodies were measured on a BIAcore 2000 instrument (BIAcore-GE Healthcare Europe GmbH, Glattbrugg, Switzerland) at room temperature and analysed with the BiaEvaluation software (version 4.1, BIAcore-GE Healthcare Europe GmbH).

[0205] Measurements were performed on CM5 sensor chips (GE Healthcare Europe GmbH, Cat. No: BR-1000-14) individually coupled with the ligand of interest using a commercial amine coupling kit (GE Healthcare Europe GmbH, Cat. No: BR-1000-50). Protein G ligand was from Pierce (Thermo Fisher Scientific-Perbio Science S.A., Lausanne, Switzerland, Cat. No: 21193).

[0206] Data (sensorgram: fc2-fc1) were fitted with a 1:1 Langmuir model with or without mass transfer as indicated. In capture experiments, to account for the experimental variations in at the beginning of each measurement, the Rmax value was set to local in all fits. Dissociation times were of at least 350 seconds. Measurements were performed in triplicate and included zero-concentration samples for referencing. Both Chi2 and residual values were used to evaluate the quality of a fit between the experimental data and individual binding models.

### Affinity Measurements on HPB-ALL Cells by FACS

[0207] HPB-ALL cells (DSMZ, Braunschweig, Germany, Cat. No: ACC483) were used as CD3 positive cell line for FACS staining. HPB-ALL were maintained in RPMI 1640 supplemented with 10% FCS and 100 U/ml Penicillin and 100 ug/ml streptomycin. 100 μl dilution series of the chimeric OKT3 antibody and humanized variants were incubated with 4×10⁵ HPB-all cells in PBS supplemented with 1% BSA and 0.1% Sodium Azide (referred as FACS buffer) for 45 min on ice. An irrelevant human IgG1 was used as isotype control and the chimeric OKT3 antibody as positive control. After washing, cells were incubated with a 1/200 dilution of anti-Human Fc-PE (EBioscience, Vienna, Austria) for 45 min on ice. Cells were then washed again and resuspended in 200 μl FACS buffer. The relative mean fluorescence of each sample was measured on FACSCalibur (BD Biosciences, Allschwil, Switzerland) Results are summarized in FIG. 9 as the relative staining of HBP-ALL compared to the chimeric OKT3 antibody.

### Cell-Lines for In Vitro Assays

### Human HER2 Positive Cell Lines

[0208] Human cells expressing HER2 antigen have been described in PCT Publication No: WO2010108127. HER2 positive human cell lines as used herein were as follows: BT474 (ATCC-LGL standards; Cat. No: HTB-20)

[0209] Culture conditions: RPMI medium supplemented with 10% heat-inactivated FBS, 1% penicillin-streptomycin (Invitrogen AG, Cat. No: 10378-016), 1% sodium pyruvate solution (PAA Laboratories, Pasching, Austria; Cat. No: S11-003), 1% MEM Non-Essential Amino Acids (PAA Laboratories, Cat. No: M11-00dsmz3) and 1% GlutaMAX-1 (Invitrogen AG, Cat. No: 35050-038) in 150 cm² tissue culture flask (TPP, Trasadingen, Switzerland; Cat. No: 90150). Cells were passaged twice per week.

[0210] JIMT-1 (DSMZ, Braunschweig, Germany, Cat. No: ACC589)

[0211] Culture conditions: Dulbeco's modified essential medium (DMEM (1×))+GlutaMAX-1 (Invitrogen AG, Cat. No: 31966-012), supplemented with 10% heat-inactivated FBS, 1% penicillin-streptomycin (Invitrogen AG, Cat. No: 10378-016), 1% sodium pyruvate solution (PAA Laboratories, Cat. No: S11-003), 1% MEM Non-Essential Amino Acids (PAA Laboratories, Cat. No: M11-003) and 1% GlutaMAX-1 (Invitrogen AG, Cat. No: 35050-038). Cells were passaged 2-3 times per week.

[0212] MDA-MB-231 (ATCC-LGL standards; Cat. No: HTB-26).

[0213] Culture conditions: same culture conditions as JIMT-1.

[0214] HT-1080 (ATCC-LGL standards; Cat. No: CCL-121).

[0215] Culture conditions: HT1080 cells are cultured in EMEM medium supplemented with 10% heat-inactivated FBS, 1% penicillin-streptomycin (Invitrogen AG, Cat. No: 10378-016), and 1% glutamine (Invitrogen AG, Cat. No: 25030-024). The cells are cultured at split three times a week (1 in 6 dilution).

[0216] NCI-N87 (ATCC-LGL standards; Cat. No: CRL-5822).

[0217] Culture conditions: NCI-N87 cells are cultured in RPMI 1640 medium with 10% heat-inactivated FBS, 1% penicillin-streptomycin (Invitrogen AG, Cat. No: 10378-016), 1% sodium pyruvate solution (PAA Laboratories, Pasching, Austria; Cat. No: S11-003), 1% MEM Non-Essential Amino Acids (PAA Laboratories, Cat. No: M11-00dsmz3), and 1% glutamine (Invitrogen AG, Cat. No: 25030-024). The cells are split twice a week (1 in 3 dilution).

### Human CD38 Positive Cell Lines

[0218] Human cells expressing CD38 antigen have been described in PCT Publication Nos: WO2005103083, WO2008047242, WO2011154453 and WO2012092612. CD38 positive human cell lines as used herein were as follows:

[0219] Stable recombinant CHO[CD38] cells

[0220] A gene coding for human CD38 was ordered at Source Biosciences (Berlin, Germany, Cat.-No.: IRAU37D11, 4309086). Human CD38 was amplified using primers adding a kozak sequence, a start codon followed by a signal peptide (murine V leader) to the 5′ end and a NheI restriction site to the 3′ end. The amplicon was cut using NheI and HindIII and cloned into the expression cassette of pT1, a pcDNA3.1 (Invitrogen AG) derived vector developed in-house. The expression cassette of pT1 links the expression of the gene of interest with expression of GFP and PAC (the gene for puromycin resistance) using two IRES (internal ribosome entry sites) on a polycistronic mRNA. A midiprep of the plasmid was prepared and the cloned CD38 open reading frame was confirmed by DNA sequencing. Suspension CHO-S cells (Invitrogen AG) were transfected using polyethyleneimine (JetPEI®, Polyplus-transfection, Illkirch, France) in 50 ml bioreactor format (TubeSpin 50 bioreactors, TPP, Trasadingen, Switzerland). For this purpose, exponential growing cells were seeded in OptiMEM medium (Invitrogen AG, Cat. No.: 31985-047). A JetPEI®:DNA complex was added to the cells. After 5 h incubation of the cells with the JetPEI®:DNA complex at 37° C. under shaking (200 RPM) for endocytosis, one volume of culture medium PowerCHO2 (Lonza, distributor RUWAG Lifescience, Bettlach, Switzerland, Cat. No: BE12-771Q) supplemented with 4 mM Gln was added to the cell suspension. The cells were then incubated on a shaken platform at 37° C., 5% CO2 and 80% humidity. One day after transfection the cells were seeded in 96 well plates at different concentrations in selective medium containing puromycin (Sigma, Cat. No: P8833-25 mg). After approximately 14 days of selection under static conditions, 46 high GFP expressing cell pools were expanded as suspension cultures using TubeSpin 50 bioreactors. Once successfully adapted to suspension, the cells were analysed for CD38 by FACS. Stable CHO[CD38] clones with a homogenous CD38 staining profile were selected and used herein.

[0221] Other CD38 positive cell lines included:

[0222] NCI-H929 (ATCC-LGL standards; Cat. No: CRL-9068).

[0223] Namalwa (ATCC-LGL standards; Cat. No: CRL-1432)

[0224] U266 (ATCC-LGL standards; Cat. No: TIB-196)

[0225] RPMI 8226 (ATCC-LGL standards; Cat. No: CCL-155)

[0226] Culture conditions: RPMI 1640 medium supplemented with 10% heat-inactivated FBS, 1% penicillin-streptomycin (Invitrogen AG) and 1% GlutaMAX-1 (Invitrogen AG)

[0227] Raji (ATCC-LGL standards; Cat. No: CCL-86)

[0228] Daudi (ATCC-LGL standards; Cat. No: CCL-213)

### Human OX40 Positive Cell Lines

[0229] Human cells expressing OX40 antigen have been described in PCT Publication No: WO2013008171.

[0230] Peripheral blood mononuclear cells (PBMCs) and HBP-ALL are examples of human OX40 positive cell lines.

[0231] Stable recombinant CHO[OX40] cells were used herein. A recombinant CHO cell line carrying a synthetic cDNA coding for human OX40 was engineered using a similar protocol to that of the stable recombinant CHO[CD38] cell line described above.

### Human CD20 Positive Cell Lines

[0232] Human cells expressing CD20 antigen have been described in PCT Publications No: WO2010095031. An example of CD20+ cancer cells is the Daudi cancer cell-line (ATCC-LGL standards; Cat. No: CCL-213), these B lymphoblast cancer cells are cultured in RPMI 1640 medium (Sigma) supplemented with 20% FBS and 1% P/S; 1% L-Glut; 1% Na-Pyr and 1% NEAA. The cells are cultured at 37° C. with 5% CO2 supplementation.

### Human EGFR Positive Cell Lines

[0233] Human cells expressing EGFR antigen have been described in PCT Publication No: WO2010108127. An example of EGFR+ cancer cells is the HT-29 cancer cell-line (ATCC-LGL standards; Cat. No: HTB-38), these colorectal cancer cells are cultured are cultured in McCoy's 5A medium (Sigma) supplemented with 10% FBS and 1% P/S; 1% L-Glut; 1% Na-Pyr and 1% NEAA. The cells are cultured at 37° C. with 5% CO2 supplementation.

### Human CD19 Positive Cell Lines

[0234] Human cells expressing CD19 antigen have been described in PCT Publication No: WO2010/095031. Namalwa (ATCC-LGL standards; Cat. No: CRL-1432) and Raji (ATCC-LGL standards; Cat. No: CCL-86) are examples of human CD20 positive cell lines.

### Human Membrane IgE Positive Cell Lines

[0235] PCT Publication No: WO2010/033736 on page 71 describes a method to class switch human PBMCs into IgE producing B cells by adding interleukin-4 (IL-4) and anti-CD40 antibody.

### Recombinant Target Antigens

### Human CD3 Gamma-Epsilon-Fc Fusion Protein

[0236] A cDNA encoding the human CD3 gamma extracellular region (UniProt accession No: P09693 residues 23-103 (SEQ ID NO: 184); UniProt Consortium (2013) Nucleic Acids Res., 41 (Database issue): D43-7; http://www.uniprot.org/) fused to the human CD3 epsilon extracellular region (UniProt accession No: P07766, residues 22-118 (SEQ ID NO: 185)) by a 26-residue peptide linker (sequence: GSADDAKKDAAKKDDAKKDDAKKDGS; SEQ ID NO: 186) was first synthesized by GENEART AG (Regensburg, Germany). This synthetic gene was fused to a human IgG1 Fc portion using standard overlap PCR techniques and a human IgG1 Fc cDNA template also obtain from Geneart AG. The resulting cDNA was cloned in the modified pcDNA3.1 plasmid mentioned above.

[0237] For transient expression of the CD3 gamma-epsilon-Fc protein (SEQ ID NO: 187), the recombinant vector was transfected into suspension-adapted HEK-EBNA cells (ATCC-CRL-10852) using Polyethyleneimine (PEI) as described above. The CD3 gamma-epsilon-Fc construct was then purified from cell-free supernatant using recombinant Streamline rProtein A media (GE Healthcare Europe GmbH, Glattbrugg, Switzerland) and used for further analysis.

### Human and Cynomolgus Monkey CD3 Epsilon 1-26_Fc Fusion Proteins

[0238] A cDNA encoding the human CD3 epsilon peptide 1-26 (UniProt accession No: P07766, amino acids 23-48, SEQ ID NO: 188) and a cDNA encoding the cynomolgus CD3 epsilon peptide 1-26 (UniProt accession No: Q95LI5, amino acids 22-47, SEQ ID NO: 189) were PCR amplified from synthetic cDNAs obtained from GENEART A.G. for the human and cynomolgus monkey CD3 epsilon extracellular regions, respectively. The amplified products were subsequently fused to a human IgG1 Fc portion using standard overlap PCR techniques. The human IgG1 Fc cDNA template was obtained from Geneart AG. The resulting cDNA were cloned in the modified pcDNA3.1 plasmid mentioned above.

[0239] For transient expression of human and cynomolgus CD3 epsilon constructs (SEQ ID NO: 190 and 191, respectively), the recombinant vectors were transfected into suspension-adapted HEK-EBNA cells (ATCC-CRL-10852) using Polyethyleneimine (PEI) as described above. The CD3 epsilon fusion constructs were then purified from cell-free supernatant using recombinant Streamline rProtein A media (GE Healthcare Europe GmbH, Glattbrugg, Switzerland) and used for further analysis. These two fusion proteins are referred herein as the human and cynomolgus monkey CD3 epsilon 1-26_Fc fusion proteins.

### Human HER2 Extracellular Region

[0240] Preparations of HER2 soluble extracellular region have been described in PCT Publication No: WO2012131555. Human HER2 soluble extracellular region fused to a poly-histidine tag (referred herein as HER2-his) or fused to a human IgG1 Fc region (referred herein as HER2-Fc) were prepared.

### Human and Cynomolgus Monkey CD38 Extracellular Regions

[0241] A cDNA for human CD38 was obtained from Source Biosciences (Erwin-Negelein-Haus, Germany, Cat. No.: IRAU37D11, 4309086), its extracellular region (UniProt accession No: P28907 residues 43-300) was PCR amplified and cloned into an in-house expression vector derived from pcDNA3.1 (Invitrogen AG). This expression vector encompassed a kozak sequence and a start codon followed by the murine VJ2C leader peptide to the 5′ end and a 6-His-tag to the 3′ end of its multiple cloning site. The soluble extracellular region of human CD38 fused to a 6-His-tag (SEQ ID NO: 192) was expressed and purified as follows: one volume of RPMI 1640 medium (PAA Laboratories, Cat. No: E15-039) containing HEK cells, 0.1% pluronic acid (Invitrogen AG), expression vector and polyethylenimine (JetPEI®, Polyplus-transfection, Illkirch, France) was incubated in a shaker flask at 37° C., 5% CO₂ and 80% humidity. One volume of ExCell293 medium supplemented with 6 mM glutamine was added to the mixture after 4 hours and incubation continued further for a total of 5 days. Post production, cell-free supernatant was prepared by centrifugation and filtrated using 0.2 μm filters, pH was adjusted at 7.4 (4° C.) using Tris 1 M pH 8.7. Ni-Sepharose Excell beads (GE Healthcare, Cat. No: 17-3712-03) were added to the solution and incubated overnight at 4° C. under agitation. The solution was loaded on an Econo-Column (Bio-Rad Laboratories AG, Reinach, Switzerland, Cat. No: 737-4252) for gravity-flow purification. The beads were washed in PBS (2×), 20 mM imidazole and the protein was eluted in PBS, 500 mM Imidazole. Eluted fractions were pooled and buffer exchanged for PBS with two dialysis steps at 4° C. The purified human CD38 extracellular region was filtrated using 0.22 μm syringe filters.

[0242] Using the methods as described above the soluble extracellular region of cynomolgus monkey CD38 antigen fused to a 6-His-tag (SEQ ID NO: 193) was cloned, expressed and purified.

### Human OX40 Extracellular Region

[0243] A method to prepare the soluble extracellular region of human OX40 has been described in PCT Publication No: WO2013008171.

### Human EGFR Extracellular Region

[0244] An example of EGFR soluble extracellular region antigen preparation has been described in PCT Publication No: WO2012131555.

### In Vitro T Cell Redirection Killing Assay

### Preparation of Peripheral Blood Mononuclear Cells

[0245] To produce peripheral blood mononuclear cells (PBMCs), blood filters containing human leukocytes were collected from the Blood Collection Centre in La Chaux-de-Fonds, Switzerland (Centre de Transfusion Sanguine et Laboratoire de Sérologie, rue Sophie-Mairet 29, CH-2300). Cells were removed from the filters by back-flushing with 60 ml of PBS containing 10 U/ml of liquemin (Drossapharm AG, Lucern, Switzerland). PBMCs were then purified with 50 mL Blood-Sep-Filter Tubes (Brunschwig, Basel, Switzerland) following manufacturer's instructions. Tubes were centrifuged for 20 min at 800 g at room temperature (without brake) and the cells were collected from the interface. Cells were washed 3× with Roswell Park Memorial Institute (RPMI, PAA Laboratories, Pasching, Austria) medium without FBS or phosphate buffered Saline (PBS). PBMCs were resuspended at 10e6 cells/mL in RDL medium (RPMI supplemented with 10% heat inactivated Fetal bovine serum (FBS) and penicillin/streptomycin) and were cultured overnight at 37° C. in a 5% CO₂ incubator prior to the assay.

### T Cell Preparations

[0246] T cell purification was performed directly after the PBMC isolation using pan-T cell isolation kit II (Myltenyi Biotec GmbH, Bergisch Gladbach, Germany, Cat. No: 130-091-156) following manufacturer's instructions. After purification, T cells were resuspended at 10e6 cells/mL in RDL medium and cultured overnight at 37° C. in a 5% CO₂ incubator prior assay.

### Assay Readouts

[0247] Two different readouts which gave highly comparable results were used to quantify the redirected killing.

[0248] A flow cytometry method, referred herein as RDL-FACS method, based on fluorescence-cytometry as described in Schlereth B et al. ((2005) Cancer Res, 65: 2882-2889), Moore P A et al. ((2011) Blood, 117(17): 4542-51) and Friedrich M et al. ((2012) Mol Cancer Ther, 11: 2664-2673). Target cells were harvested, counted, washed once and resuspended at 5×10e6 cells/mL in PBS+1 μM Carboxyfluorescein succinimidyl ester (CFSE, Sigma). Cells were incubated 15 min at 37° C. with gentle agitation every 5 min. CFSE loaded cells were washed 3× with RDL medium and resuspended at 2×10e5 cells/mL in RDL medium. PBMCs were harvested, counted and resuspended at 2×10e6 cells/mL in RDL medium. Antibodies serial dilutions (3× solutions) were prepared in RDL medium. Target cells (50 μl/well), T cells (50 μl/well) and 3× antibody solutions (50 μl/well) were distributed in flat-bottom 96-well plate (TPP, Trasadingen, Switzerland). The effector: target ratio was 10:1. The plates were incubated for 48 h in a 5% CO₂ incubator at 37° C. After incubation the plates were centrifuged for 3 min at 300 g, the supernatants were discarded by flicking the plates. The plates were washed once with 200 μl of PBS, centrifuged again and the PBS was discarded. A pre-warmed solution of accutase (Invitrogen AG) was added and the plates were incubated 10 min at 37° C. The detached adherent cells were resuspended by pipetting up and down after addition of 100 μL of RDL medium. The solution was transferred into a U-bottom 96-well plate (TPP). The U-bottom plates were centrifuged for 3 min at 300 g, the supernatants were discarded and the cells were resuspended in 200 μl of cold FACS buffer (PBS+2% FBS+10% Versene) supplemented with 7-AAD (Becton Dickinson AG, Allschwil, Switzerland) at a 1/40 dilution. The plates were immediately acquired on a Guava easyCyte™ Flow Cytometer (Millipore AG, Zug, Switzerland). For each well, the absolute number of living target cells was determined by gating on CFSE positive 7ADD negative population using Flowjo® software (Miltenyi Biotec GmbH, Bergisch Gladbach, Germany). The percentage of specific cytotoxicity for each sample was determined using the condition in which only target cells were incubated as baseline. The EC₅₀ values were determined using nonlinear variable slope regression method with Prism software (GraphPad software, La Jolla, Calif., USA). The percentage of specific re-directed lysis (RDL) was calculated by subtracting the percentage of specific cytotoxicity of the condition without antibody to the conditions where a test antibody was added.

[0249] A cell viability method, referred herein as RDL-MTS method based on a colorimetric method to assess cell viability as described in Baler P et al. ((2008) Cancer Immunol Immunother, 57: 43-52, Labrijn A F et al. ((2013) Proc Natl Acad Sci USA, 110(13): 5145-50) and PCT Publication No: WO2012143524. Target cells were harvested, counted, washed once and resuspended at 2×10e5 cells/ml in RDL medium. PBMCs were harvested, counted and resuspended at 2×10e6 cells/mL in RDL medium. Antibodies serial dilutions (3× solutions) were prepared in RDL medium. Target cells (50 μl/well), T cells (50 μl/well) and 3× antibody solutions (50 μl/well) were distributed in flat-bottom 96-well plate (TPP). The effector: target ratio was 10:1. The plates were incubated for 48 h in a 5% CO₂ incubator at 37° C. After incubation the supernatants were discarded and the plates were washed 3 times with 200 μL of PBS to remove the PBMCs and 100 μl of RDL medium was then added to each well. The readout was done using CellTiter 96® kit (Promega AG, Dübendorf, Switzerland) according to manufacturer's instructions. Briefly, 10-20 μl of MTS reagent was added to each well and the plates were incubated 2-6 h in a 5% CO₂ incubator at 37° C. The 490 nm absorbance was then read on a BioTek synergy plate reader (BioTek AG, Luzern, Switzerland). The percentage of specific killing was calculated using this formula: Specific killing=100×[(SD−Sp)/(SD−MD)]. SD is the absorbance measured in spontaneous death condition where target cells were incubated alone. Sp is the absorbance measured in each test condition (target cells+PBMCs+antibody). MD is the absorbance measured in the maximum death condition in which target cells were lysed by 3 freeze and thaw cycles. The percentage of specific redirected lysis (RDL) was calculated by subtracting the percentage specific cytotoxicity of the condition without antibody to the conditions where a test antibody was added. The EC₅₀ values were determined using nonlinear variable slope regression method with Prism software (GraphPad software).

### Xenograft Model

### JIMT-1 Xenografts

### Cells Lines and Reagents

[0250] Breast carcinoma JIMT-1 cell line was obtained from DSMZ (Cat. No: ACC589). Cells were maintained in DMEM (1×) with GlutaMAX™-1 (Invitrogen AG, Cat. No: 31966-021) supplemented with 10% heat-inactivated fetal bovine serum (FBS) (AMIMED, London, UK, Cat. No: Z10834P), 1% penicillin-streptomycin (Invitrogen AG, Cat. No: 10378-016), 1% sodium pyruvate solution (PAA Laboratories, Cat. No: S11-003), 1% MEM Non-Essential Amino Acids (PAA Laboratories, Cat. No: M11-003) and 1% GlutaMAX™-1 (Invitrogen AG, Cat. No: 35050-038). Cells were split twice a week with StemPro Accutase (Invitrogen AG, Cat. No: A11105-01).

[0251] Peripheral blood mononuclear cells (PMBC) were collected from blood filters containing human leukocytes from the Blood Collection Centre in La Chaux-de-Fonds, Switzerland (Centre de Transfusion Sanguine et Laboratoire de Sérologie, rue Sophie-Mairet 29, CH-2300). Cells were removed from the filters by back flushing with 60 ml of PBS containing 10 U/mL of liquemin (Drossapharm AG, Lucern, Switzerland). PBMCs were then isolated with 50 ml Blood-Sep-Filter Tubes (Brunschwig, Basel, Switzerland) following manufacturer's instructions: tubes were centrifuged 20 min at 800 g at RT (without brake) and the cells were collected from the interface. Cells were washed 3 times with Roswell Park Memorial Institute medium without FBS (RPMI, Invitrogen AG, Cat. No: 21875-091). PBMCs were resuspended at 10e6 cells/ml in RPMI medium supplemented with 10% FBS (AMIMED), 1% penicillin-streptomycin (Invitrogen AG) and were cultured overnight at 37° C. under 5% CO₂. Target cells were harvested, counted, washed once and resuspended at 5×10e6 cells/ml in PBS.

### Mice and Experimental Conditions

[0252] In vivo experiments were performed in 5-week-old immunodeficient NOD.CB17/AlhnRj-Prkdcscid/Rj (NOD/SCID) female mice characterized by T cell, B cell and natural killer cell deficiency (Janvier Labs, St Berthevin, France). The mice were maintained under sterile and standardized environmental conditions in standard rodent micro-isolator cages (20+/−1° C. room temperature, 50±10% relative humidity, 12 hours light dark rhythm). Mice received irradiated food, bedding and 0.22 μm-filtered drinking water. All experiments were done according to the Swiss Animal Protection Law with permission from the responsible cantonal authorities (Neuchatel Canton, Switzerland). In compliance with the Animal Protection Law, mice had to be euthanized when tumor volumes exceeded 2000 mm³. Statistical analysis of the mean tumor volume of the corresponding treatment groups versus the vehicle control group was done by ANOVA one way and Bonferroni parametric tests.

[0253] All mice were depilated before engraftment with VEET cream (Reckitt Benckiser AG, Wallisellen, Switzerland) on the right flank. Photographs and weight measurements of mice were performed on the day of engraftment and later once a week. For each animal, 5×10e6 human PBMC were mixed with 5×10e6 JIMT-1 breast carcinoma cells in a final volume of 0.2 ml PBS. Four different PBMC donors were included. The PBMC/JIMT-1 mixture was subcutaneously injected into the right flank of each NOD/SCID mouse. A control group with 5×10e6 JIMT-1 breast carcinoma cells in a final volume of 0.2 ml PBS without any human PBMC was included. For each group of ten JIMT-1/PBMC engrafted animals (one group per PBMC donor), five animals were intravenously treated with HER2/CD3-1 bispecific antibody at 0.05 mg/kg 3 hours after engraftment using a volume of 100 μl. Treatment was repeated 3 times per week, every two days, during two weeks. Tumors were measured twice a week with a caliper in two perpendicular dimensions and tumor volumes were calculated according to the following formula: tumor volume=[(width2×length)/2].

### Example 1: Determination of Mutations that Reduce or Abrogate Binding to Protein a in VH3 Subclass

[0254] Methods to abrogate Protein A binding in immunoglobulin constant region are known (Lindhofer H. et al., (1995) J Immunol, 155(1): 219-225; U.S. Pat. No. 6,551,592; Jendeberg L. et al., (1997) J Immunol Methods, 201(1): 25-34; PCT Publication No: WO2010151792). To assess the use of Protein A abrogating methods in full-length homo-dimeric immunoglobulins, an anti-HER2 homo-dimeric immunoglobulin based on a mixed IGHG1-IGHG3 Fc format and the corresponding Fc 133 control fragment were prepared. The anti-HER2 homo-dimeric immunoglobulin was formatted similarly to a naturally occurring antibody and consisted of a FAB fragment with anti-HER2 specificity fused to a Fc 133 fragment (a Fc sequence originating from the naturally occurring human IGHG3 isotype wherein the hinge sequence was substituted for the entire hinge sequence from the naturally occurring human IGHG1 isotype, abbreviated Fc 133 with SEQ ID NO:1—wherein the numerals in the name correspond to the immunoglobulin gamma isotype subclass of each domain in the order of: hinge/CH2/CH3; the corresponding full-length anti-HER2 immunoglobulin being referred herein as anti-HER2 FAB-Fc 133; heavy chain with SEQ ID NO: 2 and light chain with SEQ ID NO: 3). Post transfection, the anti-HER2 FAB-Fc 133 homo-dimer and Fc 133 fragment were assayed for Protein A binding by gradient chromatography according to the protocol described in the Materials and Methods Section. As shown in FIG. 3 and FIG. 4A, the Fc 133 fragment did not bind the commercial MabSelect SuRe™ Protein A resin (GE Healthcare Europe GmbH) while the anti-HER2 FAB-Fc 133 homo-dimer was able to bind.

[0255] To assess the contribution of the FAB constant domains, the anti-HER2 homo-dimer described above was reformatted as an anti-HER2 scFv-Fc molecule wherein the scFv unit consisted of the parent immunoglobulin variable domains fused by a 15 amino-acid linker (abbreviated herein as anti-HER2 scFv-Fc 133; heavy chain with SEQ ID NO: 4). The resulting anti-HER2 scFv-Fc 133 homo-dimer was therefore identical to the parent anti-HER2 FAB-Fc 133 homo-dimeric immunoglobulin but lacked the CH1 and CK constant domains. As shown in FIG. 4B, the scFv-Fc 133 homo-dimer exhibited Protein A binding as observed with the parent anti-HER2 homo-dimeric immunoglobulin. This finding led to the conclusion that the variable domains of the anti-HER2 FAB fragment were responsible for hampering the efficacy of the methods abrogating Protein A binding in the Fc portion of homo-dimeric immunoglobulins. More importantly, it was concluded that Protein A binding within variable domains of homo-dimeric immunoglobulins will prevent the preparation of hetero-dimeric immunoglobulins based on Protein A differential purification techniques.

[0256] All five domains of Protein A are known to bind the variable heavy chain domains from the VH3 variable domain subclass (Jansson B et al., (1998) FEMS Immunol. Med. Microbiol., 20(1): 69-78), a feature which is known to hamper the preparation of VH3 based FAB fragments following papain digestion of whole antibody molecules, since Protein A binds both VH3 based FAB and Fc fragments. The heavy chain variable domain found in the homo-dimeric anti-HER2 immunoglobulin or its scFv-Fc version belongs to the VH3-23 subclass, and explains why these homo-dimeric molecules bound Protein A in spite of having no Protein A binding site within their engineered Fc regions.

[0257] VH3 based immunoglobulins or fragments thereof are of major importance to the biotechnology industry. VH3 based molecules have been extensively developed since their ability to bind Protein A facilitates their functional pre-screening, and as such many synthetic or donor based phage display libraries or transgenic animal technologies used for antibody discovery are based on the VH3 domain subclass. In addition VH3 based molecules are often selected for their good expression and stability over other known heavy chain variable domain subclasses. A recombinant version of Protein A which does not bind VH3 based FAB fragments has been developed and commercialized by GE Healthcare under the trade name MabSelect SuRe™.

[0258] Since the MabSelect SuRe™ resin was used herein for the Protein A binding assessment of the two homo-dimeric anti-HER2 immunoglobulins discussed above, it was concluded that the MabSelect SuRe™ resin was unsuitable for the preparation of hetero-dimeric immunoglobulins having at least one VH3 variable domain when using Protein A differential purification techniques—since homo-dimeric species having no Protein A binding in their Fc regions will still bind Protein A through their VH3 domains.

[0259] To investigate substitutions that would abrogate or reduce Protein A binding from VH3 based homo-dimeric immunoglobulins or fragments thereof, VH3 based FAB variants will need to be assayed for Protein A binding. Although the MabSelect SuRe™ resin type is known to lack VH3 domain subclass binding, another commercial Protein A resin known as MabSelect™ does bind the VH3 domain subclass (also from GE healthcare) and was selected to analyse VH3 based FAB variants for Protein A binding.

[0260] The use of the MabSelect™ resin was validated by preparing a recombinant anti-HER2 FAB fragment derived from the parent anti-HER2 homo-dimeric immunoglobulin described earlier that is known to be of the VH3-23 variable domain subclass (abbreviated herein as anti-HER2 FAB; heavy chain with SEQ ID NO: 5 and light chain with SEQ ID NO: 3), and assaying the fragment onto the MabSelect™ and MabSelect SuRe™ columns (having a light chain based on the VK subclass I, the FAB fragment was first purified in capture-elution mode using protein L chromatography before Protein A gradient chromatography was performed on MabSelect™ or MabSelect SuRe™ columns, protocol for both columns followed the protocol described the Materials and Methods section). As shown in FIG. 4C, the VH3 based anti-HER2 FAB only bound to the MabSelect™ column, confirming that the MabSelect SuRe™ resin lacks binding to the VH3 based FAB fragments; at least as far as monomeric VH3 based FAB fragments are concerned, and further contrasted with the results observed earlier for the VH3 based homo-dimeric immunoglobulins with engineered Fc regions having no binding to Protein A. Conversely, the anti-HER2 FAB showed strong binding to the MabSelect™ column which offered the possibility to assay for VH3 based FAB variants that would have no or reduced Protein A binding.

[0261] To abrogate Protein A binding in VH3 based FAB fragments, critical Protein A binding residues in VH3 domains were identified from the crystal structure of a human FAB fragment in complex with the D domain of Protein A (PDB code: 1DEE; www.pdb.org; Graille M et al., (2000) Proc Natl Acad Sci USA, 97(10): 5399-5404). This analysis was used as a starting point for rational design wherein the nature of the substitutions undertaken was based on sequence comparison between Protein A binding and non-Protein A binding VH subclasses from human origin. FIG. 5 shows an alignment of one representative framework for each human heavy chain variable domain subclass. Amino acid positions 15, 17, 19, 57, 59, 64, 65, 66, 68, 70, 81, 82a, and 82b (Kabat numbering) were identified as part of the protein-protein interaction interface between the D domain of Protein A and the VH3 based FAB fragment in the 1DEE structure. Amongst human VH subclasses, VH3 is the only subclass to bind Protein A, and residues at equivalent amino acid sequence positions in other subclasses were selected to be the source of the substitutions with the view to abrogate or reduce Protein A binding while having potentially reduce immunogenicity—since these substitutions involved the replacement of one residue with another naturally occurring residue at the same equivalent amino acid position found in a non-Protein A binding human VH subclass.

[0262] Mutations were introduced in the sequence of the aforementioned anti-HER2 FAB fragment by standard PCR based mutagenesis techniques, the following substitutions were made: G65S (heavy chain with SEQ ID NO:6 and light chain with SEQ ID NO: 3), R66Q (heavy chain with SEQ ID NO: 7 and light chain with SEQ ID NO: 3), T68V (heavy chain with SEQ ID NO: 8 and light chain with SEQ ID NO: 3), Q81E (heavy chain with SEQ ID NO: 9 and light chain with SEQ ID NO: 3), N82aS (heavy chain with SEQ ID NO: 10 and light chain with SEQ ID NO: 3), and the combination R19G/T57A/Y59A (heavy chain with SEQ ID NO: 11 and light chain with SEQ ID NO: 3).

[0263] In addition, the T57A substitution (heavy chain with SEQ ID NO: 12 and light chain with SEQ ID NO: 3), and T57E substitution (heavy chain with SEQ ID NO: 13 and light chain with SEQ ID NO: 3) were made. T57A was previously shown to abrogate Protein A binding in WO2010075548, and T57E was designed to introduce a charged residue that may disrupt the VH3-Protein A interaction. Having a light chain based on the VK subfamily I, FAB mutants were first purified in capture-elution mode using Protein L chromatography, and further assayed for Protein A binding using the MabSelect™ column operated under gradient mode as described in the Materials and Methods section. FIG. 6 shows that only T57A, T57E, G65S, Q81E, N82aS and the combination R19G/T57A/Y59A abrogated or reduced anti-HER2 FAB binding to the MAbSelect™ resin. Substitutions G65S, Q81E and N82aS are preferred when abrogating Protein A binding in VH3 based FAB fragments since these mutations substitute for the sequence equivalent residue found in non-Protein A binding VH subclasses thereby potentially reducing immunogenicity.

[0264] Antibody affinity and specificity is essentially confined to the CDR regions, however, framework substitutions may impact on antibody properties as shown in the case of several humanized antibodies. To assess if the above substitutions may impact the specificity and/or the affinity of VH3 derived antibodies, two of the preferred FAB mutants were assayed for HER2 antigen binding by Surface Plasmon Resonance (SPR). SPR measurements with recombinant HER2 antigen were performed as described in the Materials and Methods section. Both preferred mutants showed identical binding to the HER2 antigen when compared to the original FAB molecule (FIG. 7) demonstrating that the substitutions had not impact in terms of specificity or affinity. It is therefore expected that these substitutions could be broadly used to engineer out Protein A binding in VH3 derived antibody molecules without significant loss of antigen binding.

[0265] Two of these preferred substitutions were introduced in the anti-HER2 homo-dimeric immunoglobulin and anti-HER2 scFv-Fc molecule described earlier, and variants were assayed for binding onto the MabSelect SuRe™ resin. The following variants were prepared: anti-HER2 scFv(G65S)-Fc 133 (heavy chain with SEQ ID NO:14), anti-HER2 scFv(N82aS)-Fc 133 (heavy chain with SEQ ID NO: 15), anti-HER2 FAB(G65S)-Fc 133 (heavy chain with SEQ ID NO: 16 and light chain with SEQ ID NO: 3), and anti-HER2 FAB(N82aS)-Fc 133 (heavy chain with SEQ ID NO: 17 and light chain with SEQ ID NO: 3).

[0266] FIG. 8 shows the profiles from the MabSelect SuRe™ chromatography for all four mutants. All variants now displayed reduced to almost no binding to the MabSelect SuRe™ column indicating a successful removal of Protein A binding with the previously identified substitutions. More importantly, it was concluded that when combined with Protein A differential purification techniques, substitutions which abrogate or reduce VH3 based FAB affinity for Protein A will allow the preparation of hetero-dimeric immunoglobulins wherein at least one VH3 variable domain is present.

### Example 2: Antigen Binding Sites that Target the Human CD3 Antigen, Tumour Associated Antigens and Inflammatory Cell Surface Antigens

### Antigen Binding Sites Against the Human CD3 Antigen

[0267] The human CD3 epsilon subunit was selected to drive T cell redirect killing via bispecific engagement.

### 2.1A Humanized Variants of the Mouse OKT3 Antibody

[0268] The anti-human CD3 epsilon antigen binding site used herein was derived from the mouse OKT3 antibody (Muromonab-CD3, trade name Orthoclone OKT3, marketed by Janssen-Cilag and subsequently discontinued; murine variable heavy chain and light chain domains with SEQ ID NO: 18 and 19, respectively). OKT3 murine variable domains were humanized and formatted as scFv and FAB fragments.

[0269] Humanization followed the method described by Jung S & Plückthun A (1997, Protein Eng, 10(8): 959-66) to produce a highly stable humanized variant that would be suitable for both FAB and scFv formatting. The method makes use of the highly stable pair of VH/VL domains found in the Herceptin® antibody (rhuMAbHER2, huMAB4D5-8, trastuzumab or trade name Herceptin®; U.S. Pat. No. 5,821,337; variable heavy chain and light chain domains with SEQ ID NO: 20 and 21, respectively) and follows the workflow of a humanization process onto fixed frameworks (Almagro J C & Fransson J (2008), Front Biosci, 13: 1619-33). Since the Herceptin® antibody is originally derived from the highly stable human families of germline framework VH3 and VK1, germline frameworks from these two families can be equally used as a source of fixed frameworks. Alternatively, the human VK3 germline light chain framework family can be used instead of VK1 as it also has good stability properties (Ewert S et al., (2003) J Mol Biol, 325: 531-553). In addition to mouse antibodies, human antibodies can be engineered using this fixed framework method to improve stability. Preferred is the use of the human germline framework IGHV3-23*04, IGKV1-39*01 and IGKV3-20*01 having SEQ ID NO: 22, 23 and 24, respectively (referenced according to IMGT® (the international ImMunoGeneTics information system (Lefranc M P et al. (1999) Nucleic Acids Res, 27(1): 209-12; Ruiz M et al. (2000) Nucleic Acids Res, 28(1): 219-21; Lefranc M P (2001) Nucleic Acids Res, 29(1): 207-9; Lefranc M P (2003) Nucleic Acids Res, 31(1): 307-10; Lefranc M P et al., (2005) Dev Comp Immunol, 29(3): 185-203; Kaas Q et al., (2007) Briefings in Functional Genomics & Proteomics, 6(4): 253-64; http://www.imgt.org).

[0270] To this aim a first humanized antibody was constructed wherein the CDRs in the variable domains of the Herceptin® antibody were respectively replaced with the CDRs from the mouse OKT3 antibody and benchmarked against a chimera of the mouse OKT3 antibody (variable heavy chain and light chain with SEQ ID NO: 25 and 26, and referred herein as the chimeric OKT3 antibody).

[0271] The prototype antibody (variable heavy chain and light chain with SEQ ID NO: 27 and 39, and abbreviated VH/VL) had increased production levels in transient expression tests and increased FAB stability as measured by differential scanning calorimetry but had no binding to HPB-ALL cells (assessed by median fluorescence intensity in FACS experiments, see Materials and Methods section), a human CD3 epsilon positive T cell tumour line (FIG. 9A).

[0272] Based on a 3D model of the first prototype pair of variable domains, a subset of back mutations (from CDR grafted Herceptin® prototype to mouse OKT3 sequence) were selected and tested: I34M, V48I, A49G, R58N, R58Y, I69L, A71T and T73K in the variable heavy chain domain and M4L, V33M, A34N, L46R, L47W, R66G, F71Y and P96F in the variable light chain (Kabat numbering). Note that the R58N substitution corresponds to a CDR grafted Herceptin® prototype-to-mouse OKT3 mutation while the R58Y substitution corresponds to a CDR grafted Herceptin® prototype-to-human IGHV3-23*04 germline substitution. The engineering strategy with regard to the combination of substitutions was based on the complementarity of the different substitutions in terms of their putative influence on CDR regions and/or variable domain packing and/or immunogenicity.

[0273] In a first approach, all candidates were formatted as human IgG1 antibodies. Best variants were selected according to expression levels, FAB fragment thermo-stability and ability to bind HPB-ALL cells by FACS. Best humanized variants had the Protein A binding site present within their VH domain abrogated using the G65S or N82aS substitution. This engineering step was needed to further produce safe T cell retargeting BEAT antibodies free of anti-CD3 homo-dimers.

[0274] Back mutations in the VH of: I34M, A49G and A71T along with back mutations in the VL of: M4L, L46R, L47W and F71Y restored affinity. Best combinations of variable domains were VH8/VL4, VH8/VL8, VH11/VL4 and VH11/VL8 as these retained most of parental cell binding (FIG. 9A-C). In addition, combinations VH8/VL8 (variable domains with SEQ ID NO: 48 and 51, respectively) and VH11/VL8 (variable domains with SEQ ID NO: 49 and 51, respectively) had enhanced FAB stability and (+2.8° C. and +1.6° C., respectively, FIG. 9D).

[0275] Finally, best humanized variants were also reformatted as scFv-Fc fusions and transiently expressed. Variants were ranked in terms of their relative affinity, stability, expression levels in transient transfection in this format (FIG. 9E). Best combinations of variable domains in a scFv-Fc fusion format were similar to the combinations identified in an antibody format: VH8-VL4 (scFv fragment with SEQ ID NO: 58) and VH8-VL8 (scFv fragment with SEQ ID NO: 59). Both scFv fragments had good thermal stability with the scFv-Fc fusion format (FIG. 9F).

### 2.1B Humanized Variants of the Mouse SP34 Antibody

[0276] The mouse antibody SP34 was first described in 1985 (Pessano S et al., (1985) EMBO J, 4(2):337-44). It was produced by a hybridoma obtained from mice immunised with denatured protein extracts from HPB-ALL cells, the antibody has human specificity and cross-reactivity to cynomolgus monkey. SP34 epitopes on human and cynomolgus monkey CD3 epsilon subunit are known (SEQ ID NO: 195 and 196, respectively).

[0277] Following the methods and work flow described in this example supra, humanized VH and VL domains for the murine SP34 antibody having a VH domain with SEQ ID NO: 60 and a VL domain with SEQ ID NO: 61 were engineered via CDR grafting onto the VH3-23 and VK3 germline frameworks, respectively. The resulting VH3 based variable domains can be further abrogated for Protein A binding using the G65S or N82aS substitutions (Kabat numbering) depending on their usage in a BEAT antibody format.

[0278] To this aim a first humanized antibody was constructed wherein the CDRs in the variable domains of a human antibody having a germline VH3 heavy chain domain and a germline VK3 light chain domain were respectively replaced with the CDRs from the mouse SP34 antibody. The resulting humanized antibody was used a starting point for further affinity improvement and benchmarked against a chimera of the SP34 antibody (heavy chain and light chain with SEQ ID NO: 62 and 63, respectively, and referred herein as the chimeric SP34 antibody).

[0279] The prototype antibody (variable heavy chain and light chain with SEQ ID NO: 64 and 69, and abbreviated VH1/VL1) had a low binding to human CD3 epsilon 1-26_Fc fusion protein (assessed by SPR, see Materials and Methods section and FIG. 10A).

[0280] Based on a 3D model of the first prototype pair of variable domains, a subset of substitutions that corresponded to either back mutations between the CDR grafted human germline VH3/VK3 prototype and mouse SP34 sequence (human-to-mouse or mouse-to-human substitutions) or rationally designed amino acid changes was selected. The following changes were made and tested in various combinations: W100eF, and W100eY in the variable heavy chain domain and A21, S25A, T27A, G27aA, V27cA, T28A, T29A, S30A, N31A, Y32A, E38Q, F44P, G46L, T51A, N52A, K53A, R54A, P56A, L66G, D69T, F87Y, Q89A, W91F, Y92A, S93A, N94A, and Q100G in the variable light chain (Kabat numbering; see FIG. 10A). The engineering strategy with regard to the combination of substitutions was based on the complementarity of the different substitutions in terms of their putative influence on CDR regions and/or variable domain packing and/or immunogenicity and/or impact on transient expression in mammalian cells.

[0281] In a first approach, all candidates were formatted as human IgG1 antibodies and later further tested in a scFv-Fc fusion protein format (FIG. 10B) with some variants having the Protein A binding site present within their VH domain abrogated using the G65S. Best humanized candidates were selected according to expression levels and ability to bind the human and cynomolgus monkey CD3 epsilon 1-26_Fc fusion proteins by SPR.

[0282] Surprisingly, when reformatted as scFv, SP34 chimera and H1L21 lead to a dramatic loss of expression compare to the IgG1 format, (FIG. 33). However, scFv-Fc expression was enhanced by the combination of substitutions W100eY in the VH and W91F in the VL (FIG. 10B).

[0283] To further improve the manufacturability of CD3 based bispecifics, humanized SP34 scFv was therefore further engineered. To identify key positions impacting SP34 scFv-Fc expression, an Alanine scan was performed in VL21 CDR. The following changes were made: T27A, G27aA, V27cA, T28A, T29A, S30A, N31A, Y32A, N52A, K53A, R54A, P56A, L90A, Y92A, S93A, N94A, and L95A. Interestingly, only substitutions at position 29, 30 (VH1/VL26 SEQ NO: 351) and 95 (VH1/VL34 SEQ NO: 363) lead to significant increase in scFv-Fc expression (FIG. 34), moreover these mutants were the only ones to retain full binding to human and Cynomologus monkey CD3 epsilon.

[0284] Based on these results, more substitutions were tested at position 29, 30 and 95 in the light chain.

[0285] As position 29 and 30 display hyper variability in all the different variable light chain families, these two positions were randomly mutated by site directed PCR. From all the mutants produced, only substitutions T29A, T29E, T29S, S30A and S30D improved significantly transient expression level FIGS. 35a and 35b while maintaining binding to human CD3 epsilon.

[0286] In a different approach, L95, which is known in the art as a canonical structure residue, was substituted with residues most frequently found at this very same position in the variable lambda families. The following changes were made L95A, L95G, L95T, L95S, L95D, and L95N. Unexpectedly, only L95G and L95T significantly improved expression while maintaining binding to the target (FIG. 35c).

[0287] From this work, several humanized SP34 based BEAT were designed and tested for expression and binding to CD3 epsilon. Among all these constructs, bispecific containing H5L65 (SEQ ID NO: 394) and H5L67 (SEQ ID NO: 396) scFv, showed a 2 fold increase in expression over the H5L32 scFv based BEAT control, FIG. 36.

[0288] H5L65 and H5L67 were further characterized by DSC either as IgG1 or scFv-Fc and compare to H5L32, H1L21 and SP34 chimera. H5L65 showed superior thermostability as IgG1 but more interestingly an increase of 5 to 2° C. compared to other humanized variants in a scFv-Fc format. (Table 1) The in vivo stability of the improved antibodies is therefore increased as it also is in vitro.

TABLE 1

| | Fab | IgG (Fab) | scFvFc |
|---|---|---|---|
| SP34 Versions | Tm (° C.) | Tm (° C.) | Tm (° C.) |
| SP34 chimera | 66.9 | 66.7 | N/A |
| hSP34 H1/L21 | 75.1 | 73.1 | 56.7 |
| hSP34 H5/L32 | 77.5 | 75.9 | 59.7 |
| hSP34 H5/L65 | 78.1 | 77.3 | 61.6 |
| hSP34 H5/L67 | 77.4 | 76.5 | 59.9 |

[0289] Preferred combinations of heavy chain and light chain variable domains with regard to antigen binding and recombinant expression were as follows: VH1 (SEQ ID NO: 101) or VH2 (SEQ ID NO: 102) or VH3 (SEQ ID NO: 103) or VH5 (SEQ ID NO: 104) paired with light chains domains VL21 (SEQ ID NO: 105), VL32 (SEQ ID NO: 106), VL65 (SEQ ID NO: 401) and VL67 (SEQ ID NO: 402).

### 2.2 HER2

[0290] Bispecific antibodies that would redirect T cells to kill HER2 positive cancer cells are useful to treat different forms of human breast cancer. Anti-HER2 antibodies have been described (Blumenthal G M et al., (2013) Clin Cancer Res, 19(18): 4911-6) with some being currently used in the clinic or currently under clinical investigations in humans (Tsang R Y & Finn R S (2012) Br J Cancer, 106(1): 6-13).

[0291] The anti-HER2 antigen binding site as used herein was derived from the recombinant humanized anti-HER2 antibody Herceptin® (see section 1.1) formatted as a FAB fragment (FAB heavy chain fragment with SEQ ID NO: 5 and light chain SEQ ID NO: 3) or a scFv fragment (SEQ ID NO: 107). In some formats, the Protein A binding present in the VH domain of the humanized anti-HER2 antibody 4D5 (VH3 domain subclass) was abrogated using the G65S substitution (FAB fragment with heavy chain having SEQ ID NO: 108 and light chain SEQ ID NO: 3 or scFv fragment with SEQ ID NO: 109) or the N82aS substitution (FAB fragment with heavy chain having SEQ ID NO: 110 and light chain SEQ ID NO: 3 or scFv fragment with SEQ ID NO: 111).

### 2.3 CD38

[0292] CD38 is a type II transmembrane glycoprotein which is normally found on hemopoietic cells and in solid tissues. CD38 is also expressed in a variety of malignant hematological diseases. Bispecific antibodies that would redirect T cells to kill CD38 positive cancer cells will be useful to treat a variety of malignant hematological diseases, including multiple myeloma, B-cell chronic lymphocytic leukaemia, B-cell acute lymphocytic leukaemia, Waldenström's macroglobulinemia, primary systemic amyloidosis, mantle-cell lymphoma, pro-lymphocytic/myelocytic leukaemia, acute myeloid leukaemia, chronic myeloid leukaemia, follicular lymphoma, NK-cell leukaemia and plasma-cell leukaemia. Several anti-CD38 antibodies have been described as research reagents or therapeutic candidates (PCT Publication No: WO2006099875). Amongst the best characterized anti-human CD38 antibodies are OKT-10 and HB-7 mouse hybridomas (Hoshino S et al., (1997) J Immunol, 158(2): 741-7).

[0293] In a first approach, anti-human CD38 antigen binding sites can be derived from mouse hybridomas OKT10 (variable heavy chain and light chain with SEQ ID NO: 112 and 113, respectively) or HB-7 (variable heavy chain and light chain with SEQ ID NO: 114 and 115, respectively) and humanized versions thereof which can be further formatted as a FAB or scFv fragments. Following the methods and work flow described in Example 2.1, humanized VH and VL domains for the HB-7 hybridoma are can engineered via CDR grafting onto the VH3-23 and VK1 germline frameworks, respectively.

[0294] In a second approach, following the so-called best-fit humanization method described by Almagro J C & Fransson J (Front Biosci, (2008) 13: 1619-33), best-fit humanized VH and VL domains for the HB-7 hybridoma were engineered via CDR grafting onto the human IGHV4-59*03 and IGKV1-NL1*01 germline frameworks, respectively (referenced according to IMGT® supra). Humanized VH and VL variants with different degree of back mutations were investigated in silico and one preferred selection of humanized VH and VL was transiently expressed as a human IgG1 format and referred herein as humanized HB-7 best-fit VH (SEQ ID NO: 116) and VL (SEQ ID NO: 117) domains. The following mouse back mutations were introduced: (VH) S35H, I37V, I48L, V67L, V71K, T73N, F78V, Y91F and (VL): M4L, L48I, Y49S, T69K (Kabat numbering).

[0295] The humanized HB-7 best-fit antibody (heavy chain with SEQ ID NO: 118 and light chain with SEQ ID NO: 119) stained CHO[CD38] recombinant cells by FACS (data not shown). The humanized HB-7 best-fit antibody had a binding affinity for the CD38 extracellular region similar to that of the chimeric HB-7 antibody (heavy chain with SEQ ID NO: 120 and light chain with SEQ ID NO: 121) when assayed by SPR (KDs of 3.6 and 2.5 nM, respectively; FIG. 11A (chimeric) and FIG. 11B (humanized)). Surprisingly, the humanized HB-7 best-fit antibody displayed a significant enhancement (+14.6° C.) in FAB fragment stability compared to the chimeric HB-7 antibody as judged from calorimetry profiles (76.4° C. (chimeric) vs 91.0° C. (humanized), FIG. 11F).

[0296] In a third approach, mice immunized with the human CD38 extracellular domain and human CD38+ cells were used to generate novel hybridoma candidates against human CD38. Methods to generate hybridomas are known and the methods used herein were similar to methods disclosed in PCT Publication No: WO2013008171. The 9G7 mouse antibody candidate had a high affinity for both human and cynomolgus monkey CD38 (variable heavy chain and light chain with SEQ ID NO: 122 and 123, respectively). This mouse antibody was first humanized according the methods described in this example supra. Using the best-fit approach, the germline VH framework IGHV2-5*09 and VK framework IGKV1-33*01 (referenced according to IMGT® supra) were selected as a starting point for the humanization process. Post CDR grafting, the first antibody prototype (formatted as a human IgG1 isoptype, heavy chain SEQ ID NO: 124 and light chain with SEQ ID NO: 125) exhibited a strong binding to human CD38 only three fold lower than the mouse parental antibody as judged by SPR (chimeric 9G7 antibody with heavy chain SEQ ID NO: 126 and light chain with SEQ ID NO: 127; KD of 0.3 nM and 1 nM for the chimeric 9G7 antibody (data not shown) and first humanized prototype (data not shown), respectively). Affinity improved by two fold upon introduction of the F36Y back mutation in the variable light chain of the antibody (Kabat numbering) (the resulting antibody is referred herein as the humanized 9G7 best-fit antibody with heavy chain SEQ ID NO: 124 and light chain with SEQ ID NO: 128; KD of 0.5 nM for human CD38, FIG. 11C). The humanized 9G7 best-fit antibody also exhibited a high affinity for the cynomolgus monkey CD38 antigen (KD of 3.2 nM, data not shown), and an enhanced FAB thermo-stability (FAB Tm from DSC scans) over the chimeric 9G7 antibody (94° C. vs. 82.2° C. for the humanized 9G7 best-fit antibody and the chimeric 9G7 antibody, respectively; see FIG. 11G). The humanized 9G7 best-fit antibody has heavy chain variable domain with SEQ ID NO: 129 and light chain variable domain with SEQ ID NO: 130.

[0297] In addition, the 9G7 mouse antibody was humanized following the best-framework approach via CDR grafting onto the VH3-23 and VK1 germline frameworks. Humanized VH and VL variants with different degree of back mutations were investigated in silico and one preferred selection of humanized VH and VL combination was transiently expressed as a human IgG1 antibody (the resulting antibody is referred herein as the humanized 9G7 best-framework antibody with heavy chain SEQ ID NO: 131 and light chain with SEQ ID NO: 132). The following mouse back mutations were introduced: (VH) A24F, V37I, V48L, S49A, F67L, R71K, N73T, L78V, and K94R, and (VL) F36Y (Kabat numbering). This antibody exhibited a strong binding to human CD38 and cynomolgus monkey CD38 with affinity constants similar to that of the humanized 9G7 best-fit antibody (KD of 0.4 and 1 nM for human and cynomolgus monkey CD38, respectively; FIG. 11D). FAB thermo-stability (FAB Tm from DSC scans) was also very similar to that of the 9G7 best-fit F36Y humanized variant (89.2° C., see FIG. 11H). FIG. 11J summarizes the different humanized 9G7 antibodies described above. The humanized 9G7 best-framework antibody has heavy chain variable domain with SEQ ID NO: 133 and light chain variable domain with SEQ ID NO: 134.

[0298] In a fourth approach, an antibody phage library was screened to generate additional scFv fragments against human CD38. The library had a diversity based on the naturally occurring human V genes. This donor derived antibody phage display library used cDNAs amplified from blood lymphocytes originating from 48 human donors of which 70% had an autoimmune disease (vasculitis, systemic lupus erythematosus, spondiloarthropathy, rheumatoid arthritis and scleroderma). Library construction followed the protocol described by Schofield et al. (2007, Genome Biol., 8(11): 8254) with a total diversity of 2.53×10e10 clones. ScFv fragments recognizing human and/or cynomolgus monkey CD38 were isolated from this donor derived phage display library as follows. ScFv fragments were isolated in a series of repeated selection cycles on recombinantly derived human and/or cynomolgus monkey CD38 antigens (see Materials and Methods section). Methods to screen antibody phage display libraries are known (Viti F et al., (2000) Methods Enzymol, 326: 480-505). Briefly, following incubation with the library, the immobilised antigen which had been previously coated on a plastic immunotube (overnight in PBS at a concentration of 20 μg/ml) or captured on streptavidin beads (when using a biotin labelled form of the antigen, antigen captured at a concentration of 50 nM throughout the selection process), bound phages were recovered whist unbound phages were washed away. Bound phages were rescued as described by Marks et al (Marks J D et al., (1991) J Mol Biol, 222(3): 581-97) and the selection process repeated three times. Over one thousand clones from the second and third round of panning were expressed and analysed by ELISA against the human and cynomolgus monkey CD38 antigens. Positive clones were subjected to DNA sequencing and some of the unique clones were further analysed for their ability to bind cell lines expressing human CD38. Following a first round of panning on a biotin labelled version of the human CD38 antigen immobilized on streptavidin beads and a second round of panning on a biotin labelled version of the cynomolgus monkey CD38 antigen immobilized on streptavidin beads, one preferred scFv fragment (clone No 767) having a variable heavy chain sequence with SEQ ID NO: 135 and a variable light chain with SEQ ID NO: 136 was selected for its ability to bind both human and cynomolgus monkey CD38. When formatted as a human IgG1 antibody, clone 767 had a KD of about 300 nM for human CD38 (FIG. 11E) and about 1.2 μM for cynomolgus monkey CD38 (data not shown) (clone 767 IgG1 antibody is referred herein as human 767 antibody with heavy chain SEQ ID NO: 137 and light chain with SEQ ID NO: 138). FAB thermo-stability (FAB Tm from DSC scans) was 70.2° C. (FIG. 11I). Clone 767 VH domain belongs to the VH3 domain subclass.

### 2.4 OX40

[0299] A bispecific antibody targeting CD3 and OX40 will allow targeting and depletion of activated T lymphocytes. In this combination, the activated T lymphocytes, which express both CD3 and OX40 molecules, will engage into a mutual killing process resulting in rapid cell disappearance. Co-engagement of human CD3 and OX40 by a bispecific antibody may achieve an effective elimination of pathogenic T cells in a short time frame. OX40 is a member of the TNFR-superfamily of receptors and was first identified in 1987 as a 50 kDa glycoprotein expressed on activated CD4+ T cells from the rat (Paterson D J et al., (1987) Mol. Immunol. 24: 1281-90). Unlike CD28, OX40 is not constitutively expressed on naïve T cells but is induced after engagement of the T-Cell Receptor (TCR). OX40 is a secondary costimulatory molecule, expressed after 24 to 72 hours following activation; its ligand, OX40L, is also not expressed on resting antigen presenting cells, but is expressed following their activation.

[0300] The mouse anti-human OX40 antibody disclosed in PCT Publication No: WO2013008171 (heavy chain and light chain domains with SEQ ID NO: 139 and 140, respectively) can be used as a source of anti-human OX40 antigen binding site. A humanized version of this antibody based on the best-fit humanization method is also disclosed in PCT Publication No: WO2013008171 (heavy chain and light chain domains with SEQ ID NO: 141 and 142, respectively and with both antibodies being amendable for reformatting into a BEAT format.

[0301] Following the methods and work flow described in Example 2.1, humanized VH and VL domains for the anti-human OX40 hybridoma are engineered via CDR grafting onto the VH3-23 and VK1 germline frameworks, respectively. The resulting VH3 based variable domains are further abrogated for Protein A binding using the G65S or N82aS substitutions (Kabat numbering) depending on their usage in a BEAT antibody format. Only two humanized VH and VL domains were investigated differing by their different degree of back mutations. Back mutations were identified from sequence alignments between the parent antibody variable domains and a CDR grafted VH3 and VK1 similar to the first prototype antibody and the approach described in Example 2.1. These CDR grafted variable domains have no back mutations and are referred to herein as mingrafts. These sequences were then further modified to include all the back mutations identified from the previous alignment and resulted in modified variable domain sequences referred to herein as maxgrafts. The resulting sequences are summarized below:

[0302] Humanized and stabilized anti-OX40 VH having no back mutations; abbreviated humanized anti-OX40/mingraft VH (SEQ ID NO: 278).

[0303] Humanized and stabilized anti-OX40 VH having all possible back mutations; abbreviated humanized anti-OX40/maxgraft VH (SEQ ID NO: 279).

[0304] Humanized and stabilized anti-OX40 VL having no back mutations; abbreviated humanized anti-OX40/mingraft VL (SEQ ID NO: 280).

[0305] Humanized and stabilized anti-OX40 VL having all possible back mutations; abbreviated humanized anti-OX40/maxgraft VL (SEQ ID NO: 281).

### 2.5 CD20

[0306] Bispecific antibodies that would redirect T cells to kill CD20 expressing B cells can be useful to treat different forms of human lymphomas cancers. Several anti-human CD20 antibodies have been described as research reagents or therapeutic candidates. Amongst the best characterized anti-human CD20 antibodies are the chimeric rituximab antibody and humanized variants thereof (chimeric rituximab antibody, trade name Rituxan®, PCT Publication No: WO1994011026; mouse VH domain of SEQ ID NO: 143 and VL domain of SEQ ID NO: 144).

[0307] Following the methods and work flow described in Example 2.1, humanized VH and VL domains for the rituximab chimeric antibody are engineered via CDR grafting onto the VH3-23 and VK1 germline frameworks, respectively. The resulting VH3 based variable domains are further abrogated for Protein A binding using the G65S or N82aS substitutions (Kabat numbering) depending on their usage in a BEAT antibody format. Two humanized VH and VL domains are investigated differing by their different degree of back mutations. Back mutations were identified from sequence alignments between the parent antibody variable domains and a CDR grafted VH3 and VK1 similar to the first prototype antibody and the approach described in Example 2.1. These CDR grafted variable domains have no back mutations and are referred to herein as mingrafts. These sequences were then further modified to include all the back mutations identified from the previous alignment and resulted in modified variable domain sequences referred to herein as maxgrafts. The resulting sequences are summarized below:

[0308] Humanized and stabilized Rituximab VH having no back mutations; abbreviated humanized Rituximab/mingraft VH (SEQ ID NO: 282).

[0309] Humanized and stabilized Rituximab VH having all possible back mutations; abbreviated humanized Rituximab/maxgraft VH (SEQ ID NO: 283).

[0310] Humanized and stabilized Rituximab VL having no back mutations; abbreviated humanized Rituximab/mingraft VL (SEQ ID NO:284).

[0311] Humanized and stabilized Rituximab VL having all possible back mutations; abbreviated humanized Rituximab/maxgraft VL (SEQ ID NO: 285).

### 2.6 EGFR

[0312] Bispecific antibodies that would redirect T cells to kill EGFR positive cancer cells can be useful to treat different forms of human cancers, preferably human pancreatic cancers and human colon cancers. Several anti-human EGFR antibodies have been described as research reagents or therapeutic candidates. Amongst the best characterized anti-human EGFR antibodies are the chimeric cetuximab antibody and humanized variants thereof (chimeric cetuximab antibody, trade name Erbitux®, C225, IMC-C225; PCT Publication No: WO199640210; mouse VH domain with SEQ ID NO: 145 and mouse VL domain with SEQ ID NO: 146).

[0313] Following the methods and work flow described in Example 2.1, humanized VH and VL domains for the Erbitux® chimeric antibody are engineered via CDR grafting onto the VH3-23 and VK1 germline frameworks, respectively. The resulting VH3 based variable domains are further abrogated for Protein A binding using the G65S or N82aS substitutions (Kabat numbering) depending on their usage in a BEAT antibody format. Two humanized VH and VL domains are investigated differing by their different degree of back mutations. Back mutations were identified from sequence alignments between the parent antibody variable domains and a CDR grafted VH3 and VK1 similar to the first prototype antibody and the approach described in Example 2.1. These CDR grafted variable domains have no back mutations and are referred to herein as mingrafts. These sequences were then further modified to include all the back mutations identified from the previous alignment and resulted in modified variable domain sequences referred to herein as maxgrafts. The resulting sequences are summarized below:

[0314] Humanized and stabilized Erbitux VH having no back mutations; abbreviated humanized Erbitux/mingraft VH (SEQ ID NO: 286).

[0315] Humanized and stabilized Erbitux VH having all possible back mutations; abbreviated humanized Erbitux/maxgraft VH (SEQ ID NO: 287).

[0316] Humanized and stabilized Erbitux VL having no back mutations; abbreviated humanized Erbitux/mingraft VL (SEQ ID NO: 288).

[0317] Humanized and stabilized Erbitux VL having all possible back mutations; abbreviated humanized Erbitux/maxgraft VL (SEQ ID NO: 289).

[0318] Another well characterized anti-human EGFR antibody is the human panitumumab antibody and humanized variants thereof (human panitumumab antibody, trade name Vectibix®, PCT Publication No: WO2012138997; mouse VH domain with SEQ ID NO: 290 and mouse VL domain with SEQ ID NO: 291).

[0319] Following the methods and work flow described in Example 2.1, humanized VH and VL domains for the Vectibix® chimeric antibody are engineered via CDR grafting onto the VH3-23 and VK1 germline frameworks, respectively. The resulting VH3 based variable domains are further abrogated for Protein A binding using the G65S or N82aS substitutions (Kabat numbering) depending on their usage in a BEAT antibody format. Two humanized VH and VL domains are investigated differing by their different degree of back mutations. Back mutations were identified from sequence alignments between the parent antibody variable domains and a CDR grafted VH3 and VK1 similar to the first prototype antibody and the approach described in Example 2.1. These CDR grafted variable domains have no back mutations and are referred to herein as mingrafts. These sequences were then further modified to include all the back mutations identified from the previous alignment and resulted in modified variable domain sequences referred to herein as maxgrafts. The resulting sequences are summarized below:

[0320] Humanized and stabilized Vectibix VH having no back mutations; abbreviated humanized Vectibix/mingraft VH (SEQ ID NO: 292).

[0321] Humanized and stabilized Vectibix VH having all possible back mutations; abbreviated humanized Vectibix/maxgraft VH (SEQ ID NO: 293).

[0322] Humanized and stabilized Vectibix VL having no back mutations; abbreviated humanized Vectibix/mingraft VL (SEQ ID NO: 294).

[0323] Humanized and stabilized Vectibix VL having all possible back mutations; abbreviated humanized Vectibix/maxgraft VL (SEQ ID NO: 295).

### 2.7 CD19

[0324] Bispecific antibodies that would redirect T cells to kill CD19 expressing B cells will be useful to treat different forms of human blood and myeloid cancers. The human CD19 molecule is a structurally distinct cell surface receptor expressed on the surface of human B cells, including, but not limited to, pre-B cells, B cells in early development (i.e., immature B cells), mature B cells through terminal differentiation into plasma cells and malignant B cells. CD19 is expressed by most pre-B acute lymphoblastic leukemias (ALL), non-Hodgkin's lymphomas, B cell chronic lymphocytic leukemias (CLL), pro-lymphocytic leukemias, hairy cell leukemias, common acute lymphocytic leukemias and some Null-acute lymphoblastic leukemias (Nadler L M et al. (1983) J Immunol, 131: 244-250; Anderson K C et al., (1984) Blood, 63: 1424-1433; Loken M R et al. (1987) Blood, 70: 1316-1324; Uckun F M et al. (1988) Blood, 71: 13-29; Scheuermann R H & Racila E (1995) Leuk Lymphoma, 18: 385-397). The expression of CD19 on plasma cells further suggests it may be expressed on differentiated B cell tumors such as multiple myeloma, plasmacytomas, Waldenström's tumors (Grossbard M L et al. (1998) Br J Haematol, 102: 509-15; Treon S P et al. (2003) Semin Oncol, 30: 248-52).

[0325] Humanized anti-human CD19 antibodies described in PCT Publication No: WO2010/095031 utilise the VH3-23 and VK1 variable domain frameworks and can be used to produce bispecific antibodies as described in Example 2.1. The humanized anti-human CD19 antibody having a VH domain with SEQ ID NO: 296 and a VL domain with SEQ ID NO: 297 is used and further abrogated for Protein A binding using the G65S or N82aS substitutions (Kabat numbering) depending on its use in a BEAT antibody format.

### 2.8 IgE

[0326] Bispecific antibodies that would redirect T cells to kill membrane bound IgE positive B cells can be useful to treat different inflammatory disease such as asthma or fibrosis. Several anti-human IgE antibodies have been described as research reagents or therapeutic candidates. Amongst the best characterized anti-human IgE antibodies are the Omalizumab antibody (trade name Xolair®, USPTO publication No: U.S. Pat. No. 6,761,889, U.S. Pat. No. 6,329,509 and US20080003218A1; Presta L G et al., (1993) J Immunol, 151: 2623-2632; humanized VH domain with SEQ ID NO: 298 and VL domain with SEQ ID NO: 299) and variants thereof.

[0327] Following the methods and work flow described in Example 2.1, humanized VH and VL domains for the Omalizumab antibody are engineered via CDR grafting onto the VH3-23 and VK1 germline frameworks, respectively. The resulting VH3 based variable domains are further abrogated for Protein A binding using the G65S or N82aS substitutions (Kabat numbering) depending on their usage in a BEAT antibody format. Two stabilized VH and VL domains are investigated differing by their different degree of back mutations. Back mutations were identified from sequence alignments between the parent antibody variable domains and a CDR grafted VH3 and VK1 similar to the first prototype antibody and the approach described in Example 2.1. These CDR grafted variable domains have no back mutations and are referred to herein as mingrafts. These sequences were then further modified to include all the back mutations identified from the previous alignment and resulted in modified variable domain sequences referred to herein as maxgrafts. The resulting sequences are summarized below:

[0328] Stabilized Omalizumab VH having no back mutations; abbreviated stabilized Omalizumab/mingraft VH (SEQ ID NO: 300).

[0329] Stabilized Omalizumab VH having all possible back mutations; abbreviated stabilized Omalizumab/maxgraft VH (SEQ ID NO: 301).

[0330] Stabilized Omalizumab VL having no back mutations; abbreviated stabilized Omalizumab/mingraft VL (SEQ ID NO: 302).

[0331] Stabilized Omalizumab VL having all possible back mutations; abbreviated stabilized Omalizumab/maxgraft VL (SEQ ID NO: 303).

[0332] Another example of anti-human IgE antibody is the mouse antibody Bsw17 (Vogel M et al., (2004) J Mol Biol, 341(2): 477-89; mouse VH domain with SEQ ID NO: 304 and mouse VL domain with SEQ ID NO: 305).

[0333] Following the methods and work flow described in Example 2.1, humanized VH and VL domains for the humanized Bsw17 antibody are engineered via CDR grafting onto the VH3-23 and VK1 germline frameworks, respectively. The resulting VH3 based variable domains are further abrogated for Protein A binding using the G65S or N82aS substitutions (Kabat numbering) depending on their usage in a BEAT antibody format. Two stabilized VH and VL domains are investigated differing by their different degree of back mutations. Back mutations were identified from sequence alignments between the parent antibody variable domains and a CDR grafted VH3 and VK1 similar to the first prototype antibody and the approach described in Example 2.1. These CDR grafted variable domains have no back mutations and are referred to herein as mingrafts. These sequences were then further modified to include all the back mutations identified from the previous alignment and resulted in modified variable domain sequences referred to herein as maxgrafts. The resulting sequences are summarized below:

[0334] Stabilized Bsw17 VH having no back mutations; abbreviated stabilized Bsw17/mingraft VH (SEQ ID NO: 306).

[0335] Stabilized Bsw17 VH having all possible back mutations; abbreviated stabilized Bsw17/maxgraft VH (SEQ ID NO: 307).

[0336] Stabilized Bsw17 VL having no back mutations; abbreviated stabilized Bsw17/mingraft VL (SEQ ID NO: 308).

[0337] Stabilized Bsw17 VL having all possible back mutations; abbreviated stabilized Bsw17/maxgraft VL (SEQ ID NO: 309).

### Example 3: Production of T Cell Retargeting Hetero-Dimeric Immunoglobulins

### 3.1 BEAT Technology and Built-in Purification System

[0338] BEAT antibodies are heavy chain hetero-dimers based on a unique concept of bio-mimicry that exhibit superior hetero-dimerization over the “knob-into-hole” technology (PCT publication No: WO2012131555). The BEAT platform is based on an exchange of interface amino acids at 3D equivalent positions between naturally occurring homo or hetero-dimeric immunoglobulin domain pairs to create new hetero-dimers that can be used as building blocks for Fc-based bispecific antibodies. The technology allows for the design of Fc-based bispecific antibodies using any type of antigen binding scaffold. A scFv-FAB format is used herein to design Fc-based bispecific antibodies without the need to develop a common light chain for both antigen binding sites.

[0339] Since BEAT antibodies are heavy chain hetero-dimers, it is needed to distinguish between the two different heavy chains. These are referred herein as BTA and BTB chains. BTA and BTB chains as used herein encompass an antigen binding site, a human IgG1 hinge region, a CH2 domain originating from human IgG1 or IgG3 isotype and a modified CH3 domain originating from human IgG1 or IgG3 isotype. Some of the BTA and BTB CH3 domains were identical or modified variants of the domains described in PCT Publication No: WO2012131555. BTA and BTB CH3 domains were selected from the groups consisting of: (BTA) SEQ ID NO: 147, 148, 149, 153, 154, and 155, and (BTB) SEQ ID NO: 150, 151, 152, 156, 157, and 158. Preferred BTA-BTB CH3 domain pairings are selected from the group consisting of: SEQ ID NO: 147 with SEQ ID NO: 150, SEQ ID NO: 148 with SEQ ID NO: 150, SEQ ID NO: 149 with SEQ ID NO: 151, SEQ ID NO: 147 with SEQ ID NO: 152, and SEQ ID NO: 148 with SEQ ID NO: 152. Most preferred BTA-BTB CH3 domain pairings are selected from the group consisting of: SEQ ID NO: 147 with SEQ ID NO: 156, SEQ ID NO: 148 with SEQ ID NO: 156, SEQ ID NO: 154 with SEQ ID NO: 150, and SEQ ID NO: 154 with SEQ ID NO: 152.

[0340] As described above, BEAT heavy chain hetero-dimers with an asymmetrical binding to Protein A can be created using parental domains from immunoglobulin isotypes having no binding to Protein A (PCT publication No: WO2012131555). A difference in the number of Protein A binding sites between homo- and hetero-dimeric species is particularly useful to resolve these molecular species by Protein A chromatography. To avoid a residual binding that will interfere with species separation by Protein A chromatography, it is necessary to abrogate any secondary Protein A binding sites which are naturally found within the VH3 subclass of human heavy chain variable domains. When antigen binding sites originate from the VH3 family, abrogation of their Protein A binding site can be achieved through the G65S or N82aS substitutions (Kabat numbering).

[0341] When preparing a bispecific antibody encompassed by the present invention, using one antigen binding site of VH3 origin and one antigen binding site from a non VH3 origin, the antigen binding site of VH3 origin needs to be located on the heavy chain that does bind Protein A in its Fc region. Alternatively, the antigen binding site of VH3 origin can be substituted with the N82aS substitution or G65S substitution or equivalent substitutions thereof to abrogate Protein A binding. When preparing a bispecific antibody from the present invention using a pair of antigen binding sites of VH3 origin, the only possibility is to abrogate Protein A binding in at least one of the VH3 based antigen binding sites through the amino acid substitutions described above. Preferably, bispecific antibodies from the present invention are engineered to create one of the two homo-dimer without Protein A binding site. More preferably, bispecific antibodies from the present invention are engineered to create one homo-dimer without Protein A binding site, and the other homo-dimer having a substantial difference in its number of Protein A binding sites (at least one Protein A binding site, preferably two Protein A binding sites) over the hetero-dimer of interest.

[0342] Mechanisms of toxicity triggered by monospecific anti-human CD3 epsilon antibodies have been under extensive investigation; direct mechanisms have been linked to affinity, epitope and valency of the antibodies but indirect mechanisms of toxicity have also been described. These indirect mechanisms of toxicity are mediated by the Fc region of the anti-human CD3 epsilon antibodies which interact with Fc receptor expressing immune cells and lead to transient T cell activation and cytokine release. With a goal to improve safety, BEAT antibodies targeting human CD3 epsilon were abrogated for Fc-receptor binding in their lower hinge region. Fc receptor binding was abrogated or reduced using the L234A and L235A substitutions (EU numbering; Strohl W R et al., (2009) Curr Opin Biotechnol, 20(6): 685-91); which are often referred as the LALA substitutions.

### Examples of BEAT Antibodies Encompassing at Least One VH3 Domain Abrogated for Protein a Binding

### Examples of HER2/CD3 Targeting BEAT Antibodies

[0343] Anti-HER2 and anti-CD3 epsilon arms can be formatted either as a scFv-Fc type of heavy chains consisting of a scFv fragment fused to a BEAT chain or as a heavy chain consisting of a FAB fragment fused to a BEAT chain similar to that of a naturally occurring antibody. The FAB based heavy chain requires its association with its cognate light chain to assemble into a functional antigen binding site.

[0344] L234A and L235A substitutions were introduced in CH2 regions and residual Protein A binding was abrogated within using the G65S or N82aS substitutions (Kabat numbering) when appropriate. Examples of BEAT antibodies targeting both human HER2 antigen and human CD3 epsilon were formatted as follows:

[0345] A first BEAT HER2/CD3 antibody was engineered using a combination of antigen binding sites described in Example and 2.2 for the anti-human CD3 epsilon and the anti-human HER2 arms, respectively. The anti-human CD3 epsilon arm of the hetero-dimeric immunoglobulin consisted of a BEAT heavy chain (SEQ ID NO: 159) encompassing a variable heavy chain region with the N82aS substitution (Kabat numbering), a CH1 γ1 region, a γ1 hinge region, a γ3 CH2 region with L234A and L235A substitutions (EU numbering), and a γ3 based BEAT CH3 domain assembled with its cognate light chain (SEQ ID NO: 47). This heavy chain encompassed part of a human IgG3 Fc region and therefore had no binding to Protein A but since the heavy chain used herein had its heavy chain variable domain originating from the VH3 domain subclass, the VH domain was mutated to include the N82aS substitution thereby removing any additional Protein A binding sites within the heavy chain. The anti-human HER2 arm of the hetero-dimeric immunoglobulin consisted of a BEAT heavy chain (SEQ ID NO: 160) encompassing a scFv fragment, a CH1 γ1 region, a γ1 hinge region, a γ1 CH2 region with L234A and L235A substitutions (EU numbering), and a γ1 based BEAT CH3 domain. This bispecific antibody is referred herein as BEAT HER2/CD3-1 antibody (FIG. 12A format A).

[0346] A second BEAT HER2/CD3 antibody was engineered using a combination of antigen binding sites described in Example 2.1 and 2.2 for the anti-human CD3 epsilon and the anti-human HER2 arms, respectively. The anti-human HER2 arm of the hetero-dimeric immunoglobulin consisted of a BEAT heavy chain (SEQ ID NO: 161) encompassing a variable heavy chain region, a CH1 γ1 region, a γ1 hinge region, a γ1 CH2 region with L234A and L235A substitutions (EU numbering), and a γ1 based BEAT CH3 domain assembled with its cognate light chain (SEQ ID NO: 3). The anti-human CD3 epsilon arm of the hetero-dimeric immunoglobulin consisted of a BEAT heavy chain (SEQ ID NO: 162) encompassing a scFv fragment, a CH1 γ1 region, a γ1 hinge region, a γ3 CH2 region with L234A and L235A substitutions (EU numbering), and a γ3 based BEAT CH3 domain. This heavy chain encompassed part of a human IgG3 Fc region and therefore had no binding to Protein A but since the heavy chain used herein had its heavy chain variable domain originating from the VH3 domain subclass, the VH domain was mutated to include the N82aS substitution thereby removing any additional Protein A binding sites within the heavy chain. This bispecific antibody is referred herein as BEAT HER2/CD3-2 antibody (FIG. 12A format B).

[0347] A third BEAT HER2/CD3 antibody was engineered using a combination of antigen binding sites described in Example 2.1 and 2.2 for the anti-human CD3 epsilon and the anti-human HER2 arms, respectively. The anti-human CD3 epsilon arm of the hetero-dimeric immunoglobulin consisted of a BEAT heavy chain (SEQ ID NO: 163) encompassing a variable heavy chain domain with the G65S substitution (Kabat numbering), a CH1 γ1 region, a γ1 hinge region, a γ3 CH2 region with L234A and L235A substitutions (EU numbering), and a γ3 based BEAT CH3 domain assembled with its cognate light chain (SEQ ID NO: 47). This heavy chain encompassed part of a human IgG3 Fc region and therefore had no binding to Protein A but since the heavy chain used herein had its heavy chain variable domain originating from the VH3 domain subclass, the VH domain was mutated to include the G65S substitution thereby removing any additional Protein A binding sites within the heavy chain. The anti-human HER2 arm of the hetero-dimeric immunoglobulin consisted of a BEAT heavy chain (SEQ ID NO: 164) encompassing a scFv fragment, a CH1 γ1 region, a γ1 hinge region, a γ1 CH2 region with L234A and L235A substitutions (EU numbering), and a γ1 based BEAT CH3 domain. The scFv portion of the bispecific antibody was further stabilised using an engineered disulfide bond between the heavy and light chain domains at Kabat position heavy chain 44 (G44C) and light chain 100 (Q100C) as described in PCT publication No WO 1994029350. This bispecific antibody is referred herein as BEAT HER2/CD3-3 antibody (FIG. 12B format C).

[0348] A fourth BEAT HER2/CD3 antibody was engineered using a combination of antigen binding sites described in Example 2.1 and 2.2 for the anti-human CD3 epsilon and the anti-human HER2 arms, respectively. The anti-human CD3 epsilon arm of the hetero-dimeric immunoglobulin consisted of a BEAT heavy chain (SEQ ID NO: 165) encompassing a variable heavy chain domain, a CH1 γ1 region, a γ1 hinge region, a γ 1 CH2 region with L234A and L235A substitutions (EU numbering), and a γ 1 based BEAT CH3 domain assembled with its cognate light chain (SEQ ID NO: 166). This heavy chain and light assembly encompassed a humanized version of the anti-human CD3 epsilon antibody (SP34) as described in PCT Publication No: WO2008119565. The anti-human HER2 arm of the hetero-dimeric immunoglobulin consisted of a BEAT heavy chain (SEQ ID NO: 167) encompassing a scFv fragment, a CH1 γ 1 region, a γ 1 hinge region, a γ 3 CH2 region with L234A and L235A substitutions (EU numbering), and a γ 3 based BEAT CH3 domain. This heavy chain encompassed part of a human IgG3 Fc region and therefore had no binding to Protein A but since the heavy chain used herein had its heavy chain variable domain originating from the VH3 domain subclass, the VH domain was mutated to include the N82aS substitution thereby removing any additional Protein A binding sites within the heavy chain. This bispecific antibody is referred herein as BEAT HER2/CD3(SP34) antibody (FIG. 12B format D).

[0349] A fifth BEAT HER2/CD3 antibody was engineered using a combination of antigen binding sites described in Example 2.1 and 2.2 for the anti-human CD3 epsilon and the anti-human HER2 arms, respectively. The anti-human CD3 epsilon arm of the hetero-dimeric immunoglobulin consisted of a BEAT heavy chain (SEQ ID NO: 168) encompassing a variable heavy chain domain, a CH1 γ1 region, a γ1 hinge region, a γ 1 CH2 region with L234A and L235A substitutions (EU numbering), and a γ 1 based BEAT CH3 domain assembled with its cognate light chain (SEQ ID NO: 89). This arm of the bispecific antibody encompassed the variable domains of the humanized SP34 VH1/VL21 antibody described in Example 2.1. The anti-human HER2 arm of the hetero-dimeric immunoglobulin consisted of a BEAT heavy chain (SEQ ID NO: 167) encompassing a scFv fragment, a CH1 γ 1 region, a γ 1 hinge region, a γ 3 CH2 region with L234A and L235A substitutions (EU numbering), and a γ 3 based BEAT CH3 domain. This arm is equivalent to the BEAT HER2/CD3(SP34) anti-HER2 arm described above (see FIG. 12B format D). The heavy chain encompassed part of a human IgG3 Fc region and therefore had no binding to Protein A but since the heavy chain used herein had its heavy chain variable domain originating from the VH3 domain subclass, the VH domain was mutated to include the N82aS substitution thereby removing any additional Protein A binding sites within the heavy chain. This bispecific antibody is referred herein as BEAT HER2/CD3(SP34-Kappa1) antibody (FIG. 12C format E).

[0350] BEAT HER2/CD3-1, BEAT HER2/CD3-2, BEAT HER2/CD3-3, BEAT HER2/CD3(SP34), and BEAT HER2/CD3(SP34-Kappa1) antibodies were expressed transiently, purified and tested in vitro for their affinity towards the HER2 and CD3 epsilon antigens, their stability and their ability to redirect T cell killing. Transient expression yields were in the range of 5-15 mg/l of culture supernatant for all BEAT antibodies. Importantly, all bispecific antibodies exhibited very low level of homo-dimeric contaminants in their preparation after a single Protein A chromatography step.

[0351] Since all these BEAT antibodies were designed with both arm encompassing a VH3 domain, only abrogation of Protein A binding in at least one VH3 domain allowed to readily purify the hetero-dimer of interest using the one of the preferred differential purification method (see FIG. 2E). An example of differential Protein A purification trace for the BEAT HER2/CD3-1 antibody is shown in FIG. 13, and FIG. 14 shows the capillary electrophoresis profile of the purified hetero-dimer. Only a marginal content of homo-dimeric contaminants can be identified from this profile. Homo-dimers of the heavy chain formatted to carry a FAB portion are not found since these do not bind Protein A. Homo-dimers of the heavy chain formatted to carry the scFv fragments are found in a marginal proportion (2.5%), resulting in a hetero-dimer content of 97% after a single Protein A chromatography step. BEAT HER2/CD3-2, BEAT HER2/CD3-3, BEAT HER2/CD3(SP34), and BEAT HER2/CD3(SP34-Kappa1) antibodies purified to similar levels of homogeneity and purity after a single Protein A chromatography step. The BEAT HER2/CD3-3 antibodies showed a proportion of disulfide bonded hetero-dimer aggregates after Protein A chromatography (27%) that were removed by cation exchange chromatography.

[0352] To further demonstrate that abrogation of Protein A binding within VH3 based heavy chain hetero-dimers greatly impacts on post Protein A chromatography purity, a BEAT HER2/CD3-1 antibody was engineered without the aforementioned N82aS substitution. FIGS. 15A and 15B show the SDS-PAGE analysis of eluted Protein A chromatography fractions for the BEAT HER2/CD3-1 and its non N82aS substituted version, respectively. At pH 4, the eluted fraction for the non N82aS substituted version exhibits an additional band corresponding to homo-dimers of the heavy chain formatted to carry a FAB arm (FIG. 15B) while the N82aS substituted BEAT HER2/CD3 version does not (FIG. 15A), since the heavy chain formatted to carry a FAB arm has no binding to Protein A in its Fc region (Fc region based on human IgG3 isotype), it can only be deduced that the VH3 based variable domains found in this homo-dimeric species are responsible for Protein A binding. This result clearly demonstrates the utility of abrogating Protein A binding within VH3 based heavy chain hetero-dimers.

[0353] Both BEAT HER2/CD3-1 and BEAT HER2/CD3-2 antibodies had similar KD values for the human HER2 and human CD3 epsilon antigens. KD values were in the range of 0.50-2 nM for the human HER2 antigen and 1-2 μM for the human CD3 epsilon antigen (measured by SPR using the human CD3gamma-epsilon-Fc construct (see Materials and Methods section; FIGS. 16A and 16B). DSC profiles for the two bispecific antibodies were similar, in both case the scFv portions either engaging human HER2 or human CD3 epsilon had retained their good thermo-stability profiles with Tm in the range of 68° C. FAB portions in both antibodies had Tm in the range of 82-83° C. (FIG. 16C).

[0354] Another example of BEAT antibodies targeting both human HER2 antigen and human CD3 epsilon using the humanized Herceptin VH and VL sequences is formatted as follows: a BEAT HER2/CD3 is engineered using a combination of antigen binding sites described in Example 2.1 and 2.2 for the anti-human CD3 epsilon and the anti-human HER2 antigen binding sites, respectively.

[0355] The anti-human HER2 arm of the hetero-dimeric immunoglobulin consists of a BEAT heavy chain (SEQ ID NO: 310) encompassing a variable heavy chain region, a CH1 γ1 region, a γ1 hinge region, a γ3 CH2 region with L234A and L235A substitutions (EU numbering), and a γ3 based BEAT CH3 domain assembled with its cognate light chain (SEQ ID NO: 3). This heavy chain encompasses part of a human IgG3 Fc region and therefore has no binding to Protein A but since the heavy chain used herein has its heavy chain variable domain originating from a VH3 framework, the VH domain is mutated to include the G65S substitution thereby removing any additional Protein A binding sites within the heavy chain.

[0356] The anti-human CD3 epsilon arm of the hetero-dimeric immunoglobulin consists of a BEAT heavy chain (SEQ ID NO: 311) encompassing a scFv fragment, a CH1 γ1 region, a γ1 hinge region, a γ1 CH2 region with L234A and L235A substitutions (EU numbering), and a γ1 based BEAT CH3 domain. This bispecific antibody is referred herein as BEAT HER2/CD3(SP34-Kappa2) antibody.

### In Vitro T Cell Killing Assays

[0357] The mechanism of action of BEAT HER2/CD3 antibodies is based on targeting cytotoxic T cell killing towards targeted cells by bridging the CD3 antigen on the cell surface of cytotoxic T cells and the HER2 antigen expressed on targeted cells.

[0358] The potency of BEAT HER2/CD3-1 and BEAT HER2/CD3-2 antibodies to redirect T cell killing was measured using a flow cytometry based method (referred herein as RDL-FACS method) or a colorimetric based method (referred herein as RDL-MTS method).

[0359] The high expressing HER2 cell line JIMT-1, a Herceptin® (trastuzumab) resistant breast carcinoma cell line, the high expressing HER2 cell line BT-474, a Herceptin® (trastuzumab) sensitive breast carcinoma cell line and the low HER2 expressing breast adenocarcinoma cell line MDA-MB-231 were individually cultured during 48 h in the presence of human PBMCs and serial dilutions of BEAT HER2/CD3-1 or -2 antibodies or control antibodies.

[0360] In these assays, human PBMCs from blood donations were used a source of cytotoxic T lymphocytes. An effector to target cells ratio of 10:1 was used in all assays. Negative controls were provided in the form of samples without antibody treatment (target cells and human PBMCs only). The cytotoxicity was determined using the RDL-FACS or RDL-MTS methods after the incubation period (see Materials and Methods section). The results showed that control antibodies did not trigger specific T cell-mediated cytotoxicity. In contrast BEAT HER2/CD3-1 and -2 antibodies induced a very potent, dose dependent, tumor target cell death. Maximum killing was close to 100%. Both readout methods gave close results. Donor-to-donor variability accounted for about a tenfold different in EC₅₀ between the methods. Measured EC₅₀s correlated to the level of HER2 antigen expression by the target cell lines.

[0361] BT-474 cells express the most HER2 antigen and EC₅₀s for both BEAT HER2/CD3-1 and -2 antibodies were in the sub-picomolar to picomolar range (0.6 and 2 pM, respectively, FIG. 17A). JIMT-1 cells have masked HER2 antigen on their cell surface (Nagy P et al. (2005), Cancer Res, 65(2): 473-482) and consequently exhibit low Herceptin® binding in spite of having high HER2 expression. Surprisingly, both BEAT HER2/CD3-1 and -2 antibodies had EC₅₀s in the picomolar range against JIMT-1 cells as measured by the RDL-MTS method (21 and 16 pM, respectively; FIG. 17B). When measured with the RDL-FACS method, the BEAT HER2/CD3-1 antibody had an EC₅₀ of 1.4 pM. Low HER2 expressing breast adenocarcinoma cell line MDA-MB-231 was less sensitive than the previous two cell lines with both antibodies exhibiting sub-nanomolar EC₅₀s (both values close to 0.2 nM; FIG. 17C). When measured with the RDL-FACS method, the BEAT HER2/CD3-1 antibody had an EC₅₀ of 0.08 nM. Taken together, these results show that BEAT HER2/CD3-1 and -2 antibodies were highly potent at redirecting T cell killing against various HER2 expressing breast cancer cell lines.

[0362] The BEAT HER2/CD3(SP34) antibody encompassed a humanized version of the anti-human CD3 epsilon antibody (SP34) described in PCT Publication No: WO2008119565. The ability of this BEAT antibody format to redirect T cell killing towards HER2+ cells was investigated in vitro. Two different HER2+ cell lines were used in killing assays, a high HER2 expressing cell line (NCI-N87) and a low HER2 expressing cell line (HT-1080) (See Materials and Methods section). FIG. 17D-E show T cell redirected killing of NCI-N87 and HT-1080 cells by the BEAT HER2/CD3(SP34) antibody, respectively. The assays used an effector cells to target cells ratio of 10 to 1, and the RDL-MTS readout method after a 48 h incubation period (see Materials and Methods section). The results show that the BEAT HER2/CD3(SP34) antibody was highly potent at redirecting T cell killing against HER2+ cell lines with EC₅₀s of 0.35 and 29 pM when targeting NCI-N87 and HT-1080 cells, respectively.

[0363] The BEAT HER2/CD3(SP34-Kappa1) antibody encompassed the humanized version of the anti-human CD3 epsilon antibody (SP34-Kappa1) VH1/VL21 described in Example 2.1. The ability of this BEAT antibody format to redirect T cell killing towards HER2+ cells was investigated in vitro. Two different HER2+ cell lines were used in killing assays, a high HER2 expressing cell line (NCI-N87) and a low HER2 expressing cell line (HT-1080) (See Materials and Methods section). FIG. 17F-G show T cell redirected killing of NCI-N87 and HT-1080 cells by the BEAT HER2/CD3(SP34-Kappa1) antibody, respectively. The assays used an effector cells to target cells ratio of 10 to 1, and the RDL-MTS readout method after a 48 h incubation period (see Materials and Methods section). The results show that the BEAT HER2/CD3(SP34-Kappa1) antibody was highly potent at redirecting T cell killing against HER2+ cell lines with EC₅₀s of 0.46 and 338 pM when targeting NCI-N87 and HT-1080 cells, respectively.

### In Vivo Efficacy Studies

### JIMT-1 Xenografts

[0364] The in vivo efficacy of the BEAT HER2/CD3-1 antibody was investigated using a JIMT-1/PBMC xenograft model. Human PBMCs from blood donations were used a source of cytotoxic T lymphocytes. Herceptin® resistant breast carcinoma JIMT-1 cells were mixed at a 1:1 ratio with non-stimulated human PBMCs (four different donors) and subsequently injected subcutaneously in immunodeficiency (NOD/SCID) mice. Following engraftment, animals were treated with the BEAT HER2/CD3-1 antibody intravenously three times per week during two weeks. Antibody treatment started 3 hours after engraftment and continued on day 2, 4, 7, 9 and 11 thereafter.

[0365] To assess tumour growth without PBMCs, one cohort out of five was inoculated subcutaneously with 5×10e6 JIMT-1 cells in the absence of human PBMCs, whereas the remaining cohorts were subcutaneously injected with mixtures of 5×10e6 JIMT-1 cells mixed with 5×10e6 non-stimulated human PBMCs from healthy donors.

[0366] Human PBMCs, in the absence of antibody did not show a negative effect on tumour growth (FIG. 18A). Treatment with the BEAT HER2/CD3-1 antibody, in the presence of human effector cells induced a complete suppression of tumour growth in most of the animals (18/20 tumours, FIG. 18B-C). Eighteen days after the last day of treatment, only 11% of tumours (2/18) started to grow again. These data show very clearly the potent antitumor efficacy of the BEAT HER2/CD3-1 antibody.

### Examples of CD38/CD3 Targeting BEAT Antibodies

[0367] Anti-CD38 and anti-CD3 epsilon arms can be formatted either as a scFv-Fc type of heavy chains consisting of a scFv fragment fused to a BEAT chain or as a heavy chain consisting of a FAB fragment fused to a BEAT chain similar to that of a naturally occurring antibody. The FAB based heavy chain requires its association with its cognate light chain to assemble into a functional antigen binding site.

[0368] L234A and L235A substitutions were introduced in CH2 regions and residual Protein A binding was abrogated within using the G65S or N82aS substitutions (Kabat numbering) when appropriate. Examples of BEAT antibodies targeting both human CD38 antigen and human CD3 epsilon were formatted as follows:

[0369] A first example of BEAT antibodies targeting both human CD38 antigen and human CD3 epsilon using the humanized HB7 bestfit VH and VL sequences was formatted as follows: A BEAT CD38/CD3 antibody was engineered using a combination of antigen binding sites described in Example 2.1 and 2.3 for the anti-human CD3 epsilon and the anti-human CD38 arms, respectively. The anti-human CD38 arm of the hetero-dimeric immunoglobulin consisted of a BEAT heavy chain (SEQ ID NO: 169) encompassing a variable heavy chain region, a CH1 γ1 region, a γ1 hinge region, a γ1 CH2 region with L234A and L235A substitutions (EU numbering), and a γ1 based BEAT CH3 domain assembled with its cognate light chain (SEQ ID NO: 119). The anti-human CD3 epsilon arm of the hetero-dimeric immunoglobulin consisted of a BEAT heavy chain (SEQ ID NO: 162) encompassing a scFv fragment, a CH1 γ1 region, a γ1 hinge region, a γ3 CH2 region with L234A and L235A substitutions (EU numbering), and a γ3 based BEAT CH3 domain. This heavy chain encompassed part of a human IgG3 Fc region and therefore had no binding to Protein A but since the heavy chain used herein had its heavy chain variable domain originating from a VH3 framework, the VH domain was mutated to include the N82aS substitution thereby removing any additional Protein A binding sites within the heavy chain. This arm is equivalent to the BEAT HER2/CD3-2 anti-CD3 epsilon arm described above (see FIG. 12A format B). The bispecific antibody is referred herein as BEAT CD38-HB7bestfit/CD3 antibody (FIG. 19 format A).

[0370] The BEAT CD38-HB7bestfit/CD3 antibody was expressed transiently, purified and tested in vitro for its affinity towards the CD38 and CD3 epsilon antigens, its stability and its ability to redirect T cell killing. The KD value was 3.2 nM for the human CD38 antigen (measured by SPR; FIG. 20A). DSC profiles for the bispecific antibody showed good thermo-stability profiles with a Tm of approximately 68° C. for the scFv portion. The FAB portion had a Tm of approximately 91° C. (FIG. 20B).

[0371] CD38 expressing cell lines (see Materials and Methods section) were used to assess redirected T cell killing in assays similar to that of described in Example 3.2.1. FIG. 21 shows T cell redirected killing of RPMI 8226 myeloma cells using the BEAT CD38-HB7bestfit/CD3 antibody. Note that the assay used purified T cells as effector cells with an effector cells to target cells ratio of 10 to 1. When measured with the RDL-FACS method, the BEAT CD38-HB7bestfit/CD3 antibody had an EC₅₀ of 2.2 pM (mean of 2 donors, 48 h incubation).

[0372] A second example of BEAT antibodies targeting both human CD38 antigen and human CD3 epsilon using the human clone 767 VH and VL sequences was formatted as follows: a BEAT CD38/CD3 antibody was engineered using a combination of antigen binding sites described in Example 2.1 and 2.3 for the anti-human CD3 epsilon and the anti-human CD38 arms, respectively. The anti-human CD38 arm of the hetero-dimeric immunoglobulin consisted of a BEAT heavy chain (SEQ ID NO: 170) encompassing a variable heavy chain region, a CH1 γ1 region, a γ1 hinge region, a γ1 CH2 region with L234A and L235A substitutions (EU numbering), and a γ1 based BEAT CH3 domain assembled with its cognate light chain (SEQ ID NO: 138). The anti-human CD3 epsilon arm of the hetero-dimeric immunoglobulin consisted of a BEAT heavy chain (SEQ ID NO: 171) encompassing a scFv fragment, a CH1 γ1 region, a γ1 hinge region, a γ3 CH2 region with L234A and L235A substitutions (EU numbering), and a γ3 based BEAT CH3 domain. This heavy chain encompassed part of a human IgG3 Fc region and therefore had no binding to Protein A but since the heavy chain used herein had its heavy chain variable domain originating from a VH3 framework, the VH domain was mutated to include the G65S substitution thereby removing any additional Protein A binding sites within the heavy chain. This bispecific antibody is referred herein as BEAT CD38-767/CD3 antibody (FIG. 19 format B).

[0373] The BEAT CD38-767/CD3 antibody was expressed transiently, purified and tested in vitro for its affinity towards the CD38 and CD3 epsilon antigens, its stability and its ability to redirect T cell killing. CD38 expressing cell lines (see Materials and Methods section) were used to assess redirected T cell killing in assays similar to that of described in Example 3.2.1. FIG. 22 shows T cell redirected killing of Daudi cells using the BEAT CD38-767/CD3 antibody. Note that the assay used human PBMCs as effector cells with an effector cells to target cells ratio of 10:1. When measured with the RDL-FACS method, the BEAT CD38-767/CD3 antibody had an EC₅₀ of 244 pM (mean of 3 donors, 24 h incubation).

[0374] Another example of BEAT antibodies targeting both human CD38 antigen and human CD3 epsilon using the humanized 9G7 best-framework VH and VL sequences is formatted as follows: a BEAT CD38/CD3 is engineered using a combination of antigen binding sites described in Example 2.1 and 2.3 for the anti-human CD3 epsilon and the anti-human CD38 antigen binding sites, respectively.

[0375] The anti-human CD38 arm of the hetero-dimeric immunoglobulin consists of a BEAT heavy chain (SEQ ID NO: 312 or 404) encompassing a variable heavy chain region, a CH1 γ1 region, a γ1 hinge region, a γ3 CH2 region with L234A and L235A substitutions (EU numbering), and a γ3 based BEAT CH3 domain assembled with its cognate light chain (SEQ ID NO: 132). This heavy chain encompasses part of a human IgG3 Fc region and therefore has no binding to Protein A but since the heavy chain used herein has its heavy chain variable domain originating from a VH3 framework, the VH domain is mutated to include the G65S substitution thereby removing any additional Protein A binding sites within the heavy chain. The anti-human CD3 epsilon arm of the hetero-dimeric immunoglobulin consists of a BEAT heavy chain (SEQ ID NO: 311) encompassing a scFv fragment, a CH1 γ1 region, a γ1 hinge region, a γ1 CH2 region with L234A and L235A substitutions (EU numbering), and a γ1 based BEAT CH3 domain. This bispecific antibody is referred herein as BEAT CD38-9G7bestframework/CD3(SP34-Kappa2) antibody.

[0376] Another example of BEAT antibodies targeting both human CD38 antigen and human CD3 epsilon using the human clone 767 VH and VL sequences is formatted as follows: a BEAT CD38/CD3 is engineered using a combination of antigen binding sites described in Example 2.1 and 2.3 for the anti-human CD3 epsilon and the anti-human CD38 antigen binding sites, respectively.

[0377] The anti-human CD38 arm of the hetero-dimeric immunoglobulin consists of a BEAT heavy chain (SEQ ID NO: 313) encompassing a variable heavy chain region, a CH1 γ1 region, a γ1 hinge region, a γ3 CH2 region with L234A and L235A substitutions (EU numbering), and a γ3 based BEAT CH3 domain assembled with its cognate light chain (SEQ ID NO: 138). This heavy chain encompasses part of a human IgG3 Fc region and therefore has no binding to Protein A but since the heavy chain used herein has its heavy chain variable domain originating from a VH3 framework, the VH domain is mutated to include the G65S substitution thereby removing any additional Protein A binding sites within the heavy chain. The anti-human CD3 epsilon arm of the hetero-dimeric immunoglobulin consists of a BEAT heavy chain (SEQ ID NO: 311) encompassing a scFv fragment, a CH1 γ1 region, a γ1 hinge region, a γ1 CH2 region with L234A and L235A substitutions (EU numbering), and a γ1 based BEAT CH3 domain. This bispecific antibody is referred herein as BEAT CD38-767/CD3(SP34-Kappa2) antibody.

### Examples of OX40/CD3 Targeting BEAT Antibodies

[0378] Anti-OX40 and anti-CD3 epsilon arms can be formatted either as a scFv-Fc type of heavy chains consisting of a scFv fragment fused to a BEAT chain or as a heavy chain consisting of a FAB fragment fused to a BEAT chain similar to that of a naturally occurring antibody. The FAB based heavy chain requires its association with its cognate light chain to assemble into a functional antigen binding site.

[0379] L234A and L235A substitutions were introduced in CH2 regions and residual Protein A binding was abrogated within using the G65S or N82aS substitutions (Kabat numbering) when appropriate. Examples of BEAT antibodies targeting both human OX40 antigen and human CD3 epsilon were formatted as follows:

[0380] An example of BEAT OX40/CD3 antibody was engineered using a combination of antigen binding sites described in Example 2.1 and 2.4 for the anti-human CD3 epsilon and the anti-human OX40 arms, respectively. The anti-human OX40 arm of the hetero-dimeric immunoglobulin used the variable domains of the humanized anti-human OX40 antibody disclosed in PCT Publication No: WO2013008171 (variable heavy chain and light chain domains with SEQ ID NO: 141 and 142, respectively) and consisted of a BEAT heavy chain (SEQ ID NO: 172) encompassing a variable heavy chain region, a CH1 γ1 region, a γ1 hinge region, a γ1 CH2 region with L234A and L235A substitutions (EU numbering), and a γ1 based BEAT CH3 domain assembled with its cognate light chain (SEQ ID NO: 173). The anti-human CD3 epsilon arm of the hetero-dimeric immunoglobulin consisted of a BEAT heavy chain (SEQ ID NO: 162) encompassing a scFv fragment, a CH1 γ1 region, a γ1 hinge region, a γ3 CH2 region with L234A and L235A substitutions (EU numbering), and a γ3 based BEAT CH3 domain. This heavy chain encompassed part of a human IgG3 Fc region and therefore had no binding to Protein A but since the heavy chain used herein had its heavy chain variable domain originating from a VH3 framework, the VH domain was mutated to include the N82aS substitution thereby removing any additional Protein A binding sites within the heavy chain. This arm is equivalent to the BEAT HER2/CD3-2 anti-CD3 epsilon arm described above (see FIG. 12A format B). The bispecific antibody is referred herein as BEAT OX40/CD3 antibody (FIG. 23).

[0381] The ability of the BEAT OX40/CD3 antibody to redirect T cell killing towards OX40+ cells was investigated in vitro. The stable recombinant CHO[OX40] cell line was used in killing assays. FIG. 24 show T cell redirected killing of stable recombinant CHO[OX40] cells by the BEAT OX40/CD3 antibody. The assays used human PBMCs as effector cells with an effector cells to target cells ratio of 20 to 1, and the RDL-MTS readout method after a 48 h incubation period (see Materials and Methods section). The results show that the BEAT OX40/CD3 antibody was highly potent at redirecting T cell killing against the stable recombinant CHO[OX40] cells with an EC₅₀ of 0.5 nM (mean of 3 donors).

[0382] Another example of BEAT antibodies targeting both human OX40 antigen and human CD3 epsilon using the humanized anti-OX40/maxgraft VH and VL sequences is formatted as follows: a BEAT OX40/CD3 is engineered using a combination of antigen binding sites described in Example 2.1 and 2.4 for the anti-human CD3 epsilon and the anti-human OX40 antigen binding sites, respectively.

[0383] The anti-human OX40 arm of the hetero-dimeric immunoglobulin consists of a BEAT heavy chain (SEQ ID NO: 314) encompassing a variable heavy chain region, a CH1 γ1 region, a γ1 hinge region, a γ3 CH2 region with L234A and L235A substitutions (EU numbering), and a γ3 based BEAT CH3 domain assembled with its cognate light chain (SEQ ID NO: 315). This heavy chain encompasses part of a human IgG3 Fc region and therefore has no binding to Protein A but since the heavy chain used herein has its heavy chain variable domain originating from a VH3 framework, the VH domain is mutated to include the G65S substitution thereby removing any additional Protein A binding sites within the heavy chain. The anti-human CD3 epsilon arm of the hetero-dimeric immunoglobulin consists of a BEAT heavy chain (SEQ ID NO: 311) encompassing a scFv fragment, a CH1 γ1 region, a γ1 hinge region, a γ1 CH2 region with L234A and L235A substitutions (EU numbering), and a γ1 based BEAT CH3 domain. This bispecific antibody is referred herein as BEAT OX40maxgraft/CD3(SP34-Kappa2) antibody.

[0384] Another example of BEAT antibodies targeting both human OX40 antigen and human CD3 epsilon using the humanized anti-OX40/mingraft VH and VL sequences is formatted as follows: a BEAT OX40/CD3 is engineered using a combination of antigen binding sites described in Example 2.1 and 2.4 for the anti-human CD3 epsilon and the anti-human OX40 antigen binding sites, respectively.

[0385] The anti-human OX40 arm of the hetero-dimeric immunoglobulin consists of a BEAT heavy chain (SEQ ID NO: 316) encompassing a variable heavy chain region, a CH1 γ1 region, a γ1 hinge region, a γ3 CH2 region with L234A and L235A substitutions (EU numbering), and a γ3 based BEAT CH3 domain assembled with its cognate light chain (SEQ ID NO: 317). This heavy chain encompasses part of a human IgG3 Fc region and therefore has no binding to Protein A but since the heavy chain used herein has its heavy chain variable domain originating from a VH3 framework, the VH domain is mutated to include the G65S substitution thereby removing any additional Protein A binding sites within the heavy chain. The anti-human CD3 epsilon arm of the hetero-dimeric immunoglobulin consists of a BEAT heavy chain (SEQ ID NO: 311) encompassing a scFv fragment, a CH1 γ1 region, a γ1 hinge region, a γ1 CH2 region with L234A and L235A substitutions (EU numbering), and a γ1 based BEAT CH3 domain. This bispecific antibody is referred herein as BEAT OX40mingraft/CD3(SP34-Kappa2) antibody.

### Examples of CD20/CD3 Targeting BEAT Antibodies

[0386] An example of BEAT antibodies targeting both human CD20 antigen and human CD3 epsilon using the mouse rituximab antibody VH and VL sequences was formatted as follows: A BEAT CD20/CD3 was engineered using a combination of antigen binding sites described in Example 2.1 and 2.5 for the anti-human CD3 epsilon and the anti-human CD20 arms, respectively.

[0387] An example of BEAT antibodies targeting both human CD20 antigen and human CD3 epsilon using the humanized rituximab/maxgraft VH and VL sequences is formatted as follows: a BEAT CD20/CD3 is engineered using a combination of antigen binding sites described in Example 2.1 and 2.5 for the anti-human CD3 epsilon and the anti-human CD20 antigen binding sites, respectively.

[0388] The anti-human CD20 arm of the hetero-dimeric immunoglobulin consists of a BEAT heavy chain (SEQ ID NO: 318) encompassing a variable heavy chain region, a CH1 γ1 region, a γ1 hinge region, a γ3 CH2 region with L234A and L235A substitutions (EU numbering), and a γ3 based BEAT CH3 domain assembled with its cognate light chain (SEQ ID NO: 319). This heavy chain encompasses part of a human IgG3 Fc region and therefore has no binding to Protein A but since the heavy chain used herein has its heavy chain variable domain originating from a VH3 framework, the VH domain is mutated to include the G65S substitution thereby removing any additional Protein A binding sites within the heavy chain. The anti-human CD3 epsilon arm of the hetero-dimeric immunoglobulin consists of a BEAT heavy chain (SEQ ID NO: 311) encompassing a scFv fragment, a CH1 γ1 region, a γ1 hinge region, a γ1 CH2 region with L234A and L235A substitutions (EU numbering), and a γ1 based BEAT CH3 domain. This bispecific antibody is referred herein as BEAT CD20maxgraft/CD3(SP34-Kappa2) antibody.

[0389] Another example of BEAT antibodies targeting both human CD20 antigen and human CD3 epsilon using the humanized rituximab/mingraft VH and VL sequences is formatted as follows: a BEAT CD20/CD3 is engineered using a combination of antigen binding sites described in Example 2.1 and 2.5 for the anti-human CD3 epsilon and the anti-human CD20 antigen binding sites, respectively.

[0390] The anti-human CD20 arm of the hetero-dimeric immunoglobulin consists of a BEAT heavy chain (SEQ ID NO: 320) encompassing a variable heavy chain region, a CH1 γ1 region, a γ1 hinge region, a γ3 CH2 region with L234A and L235A substitutions (EU numbering), and a γ3 based BEAT CH3 domain assembled with its cognate light chain (SEQ ID NO: 321). This heavy chain encompasses part of a human IgG3 Fc region and therefore has no binding to Protein A but since the heavy chain used herein has its heavy chain variable domain originating from a VH3 framework, the VH domain is mutated to include the G65S substitution thereby removing any additional Protein A binding sites within the heavy chain. The anti-human CD3 epsilon arm of the hetero-dimeric immunoglobulin consists of a BEAT heavy chain (SEQ ID NO: 311) encompassing a scFv fragment, a CH1 γ1 region, a γ1 hinge region, a γ1 CH2 region with L234A and L235A substitutions (EU numbering), and a γ1 based BEAT CH3 domain. This bispecific antibody is referred herein as BEAT CD20mingraft/CD3(SP34-Kappa2) antibody.

### Examples of EGFR/CD3 Targeting BEAT Antibodies

[0391] Anti-EGFR and anti-CD3 epsilon arms can be formatted either as a scFv-Fc type of heavy chains consisting of a scFv fragment fused to a BEAT chain or as a heavy chain consisting of a FAB fragment fused to a BEAT chain similar to that of a naturally occurring antibody. The FAB based heavy chain requires its association with its cognate light chain to assemble into a functional antigen binding site.

[0392] L234A and L235A substitutions were introduced in CH2 regions and residual Protein A binding was abrogated within using the G65S or N82aS substitutions (Kabat numbering) when appropriate. Examples of BEAT antibodies targeting both human EGFR antigen and human CD3 epsilon were formatted as follows:

[0393] An example of BEAT antibodies targeting both human EGFR and human CD3 epsilon antigens is formatted as follows: a BEAT EGFR/CD3 is engineered using a combination of antigen binding sites described in Example 2.1 and 2.6 for the anti-human CD3 epsilon and the anti-human EGFR arms, respectively. The anti-human EGFR arm of the hetero-dimeric immunoglobulin consisted of a BEAT heavy chain (SEQ ID NO: 174) based on the mouse Erbitux antibody variable domains (mouse variable heavy and light chain domains with SEQ ID NO: 145 and 146, respectively) that encompassed a variable heavy chain region, a CH1 γ1 region, a γ1 hinge region, a γ1 CH2 region with L234A and L235A substitutions (EU numbering), and a γ1 based BEAT CH3 domain assembled with its cognate light chain (SEQ ID NO: 175). The anti-human CD3 epsilon arm of the hetero-dimeric immunoglobulin consisted of a BEAT heavy chain (SEQ ID NO: 171) encompassing a scFv fragment, a CH1 γ1 region, a γ1 hinge region, a γ3 CH2 region with L234A and L235A substitutions (EU numbering), and a γ3 based BEAT CH3 domain. This heavy chain encompassed part of a human IgG3 Fc region and therefore had no binding to Protein A but since the heavy chain used herein had its heavy chain variable domain originating from a VH3 framework, the VH domain was mutated to include the G65S substitution thereby removing any additional Protein A binding sites within the heavy chain. This arm is equivalent to the BEAT CD38-767/CD3 anti-CD3 epsilon arm described above (see FIG. 19 format B). The bispecific antibody is referred herein as BEAT EGFR/CD3 antibody (FIG. 25).

[0394] The BEAT EGFR/CD3 antibody was transiently expressed, purified and tested in vitro for its ability to redirect T cell killing against human EGFR+ cell lines. The HT-29 cell line was used in killing assays. FIG. 26 show T cell redirected killing of HT-29 cells by the BEAT EGFR/CD3 antibody. The assays used human PBMCs as effector cells with an effector cells to target cells ratio of 10 to 1, and the RDL-MTS readout method after a 48 h incubation period (see Materials and Methods section). The results show that the BEAT EGFR/CD3 antibody was highly potent at redirecting T cell killing against HT-29 cells with an EC₅₀ of 70.6 pM (mean of 4 donors).

[0395] Another example of BEAT antibodies targeting both human EGFR antigen and human CD3 epsilon using the humanized Erbitux/maxgraft VH and VL sequences is formatted as follows: a BEAT EGFR/CD3 is engineered using a combination of antigen binding sites described in Example 2.1 and 2.6 for the anti-human CD3 epsilon and the anti-human EGFR antigen binding sites, respectively.

[0396] The anti-human EGFR arm of the hetero-dimeric immunoglobulin consists of a BEAT heavy chain (SEQ ID NO: 322) encompassing a variable heavy chain region, a CH1 γ1 region, a γ1 hinge region, a γ3 CH2 region with L234A and L235A substitutions (EU numbering), and a γ3 based BEAT CH3 domain assembled with its cognate light chain (SEQ ID NO: 323). This heavy chain encompasses part of a human IgG3 Fc region and therefore has no binding to Protein A but since the heavy chain used herein has its heavy chain variable domain originating from a VH3 framework, the VH domain is mutated to include the G65S substitution thereby removing any additional Protein A binding sites within the heavy chain. The anti-human CD3 epsilon arm of the hetero-dimeric immunoglobulin consists of a BEAT heavy chain (SEQ ID NO: 311) encompassing a scFv fragment, a CH1 γ1 region, a γ1 hinge region, a γ1 CH2 region with L234A and L235A substitutions (EU numbering), and a γ1 based BEAT CH3 domain. This bispecific antibody is referred herein as BEAT EGFRcetux-maxgraft/CD3(SP34-Kappa2) antibody.

[0397] Another example of BEAT antibodies targeting both human EGFR antigen and human CD3 epsilon using the humanized Erbitux/mingraft VH and VL sequences is formatted as follows: a BEAT EGFR/CD3 is engineered using a combination of antigen binding sites described in Example 2.1 and 2.6 for the anti-human CD3 epsilon and the anti-human EGFR antigen binding sites, respectively.

[0398] The anti-human EGFR arm of the hetero-dimeric immunoglobulin consists of a BEAT heavy chain (SEQ ID NO: 324) encompassing a variable heavy chain region, a CH1 γ1 region, a γ1 hinge region, a γ3 CH2 region with L234A and L235A substitutions (EU numbering), and a γ3 based BEAT CH3 domain assembled with its cognate light chain (SEQ ID NO: 325). This heavy chain encompasses part of a human IgG3 Fc region and therefore has no binding to Protein A but since the heavy chain used herein has its heavy chain variable domain originating from a VH3 framework, the VH domain is mutated to include the G65S substitution thereby removing any additional Protein A binding sites within the heavy chain. The anti-human CD3 epsilon part of the hetero-dimeric immunoglobulin consists of a BEAT heavy chain (SEQ ID NO: 311) encompassing a scFv fragment, a CH1 γ1 region, a γ1 hinge region, a γ1 CH2 region with L234A and L235A substitutions (EU numbering), and a γ1 based BEAT CH3 domain. This bispecific antibody is referred herein as BEAT EGFRcetux-mingraft/CD3(SP34-Kappa2) antibody.

[0399] Another example of BEAT antibodies targeting both human EGFR antigen and human CD3 epsilon using the humanized Vectibix/maxgraft VH and VL sequences is formatted as follows: a BEAT EGFR/CD3 is engineered using a combination of antigen binding sites described in Example 2.1 and 2.6 for the anti-human CD3 epsilon and the anti-human EGFR antigen binding sites, respectively.

[0400] The anti-human EGFR arm of the hetero-dimeric immunoglobulin consists of a BEAT heavy chain (SEQ ID NO: 326) encompassing a variable heavy chain region, a CH1 γ1 region, a γ1 hinge region, a γ3 CH2 region with L234A and L235A substitutions (EU numbering), and a γ3 based BEAT CH3 domain assembled with its cognate light chain (SEQ ID NO: 327). This heavy chain encompasses part of a human IgG3 Fc region and therefore has no binding to Protein A but since the heavy chain used herein has its heavy chain variable domain originating from a VH3 framework, the VH domain is mutated to include the G65S substitution thereby removing any additional Protein A binding sites within the heavy chain.

[0401] The anti-human CD3 epsilon arm of the hetero-dimeric immunoglobulin consists of a BEAT heavy chain (SEQ ID NO: 311) encompassing a scFv fragment, a CH1 γ1 region, a γ1 hinge region, a γ1 CH2 region with L234A and L235A substitutions (EU numbering), and a γ1 based BEAT CH3 domain. This bispecific antibody is referred herein as BEAT EGFRpani-maxgraft/CD3(SP34-Kappa2) antibody.

[0402] Another example of BEAT antibodies targeting both human EGFR antigen and human CD3 epsilon using the humanized Vectibix/mingraft VH and VL sequences is formatted as follows: a BEAT EGFR/CD3 is engineered using a combination of antigen binding sites described in Example 2.1 and 2.6 for the anti-human CD3 epsilon and the anti-human EGFR antigen binding sites, respectively.

[0403] The anti-human EGFR arm of the hetero-dimeric immunoglobulin consists of a BEAT heavy chain (SEQ ID NO: 328) encompassing a variable heavy chain region, a CH1 γ1 region, a γ1 hinge region, a γ3 CH2 region with L234A and L235A substitutions (EU numbering), and a γ3 based BEAT CH3 domain assembled with its cognate light chain (SEQ ID NO: 329). This heavy chain encompasses part of a human IgG3 Fc region and therefore has no binding to Protein A but since the heavy chain used herein has its heavy chain variable domain originating from a VH3 framework, the VH domain is mutated to include the G65S substitution thereby removing any additional Protein A binding sites within the heavy chain. The anti-human CD3 epsilon arm of the hetero-dimeric immunoglobulin consists of a BEAT heavy chain (SEQ ID NO: 311) encompassing a scFv fragment, a CH1 γ1 region, a γ1 hinge region, a γ1 CH2 region with L234A and L235A substitutions (EU numbering), and a γ1 based BEAT CH3 domain. This bispecific antibody is referred herein as BEAT EGFRpani-mingraft/CD3(SP34-Kappa2) antibody.

### Examples of CD19/CD3 BEAT Antibodies

[0404] Anti-CD19 and anti-CD3 heavy chains can be formatted either as a scFv-Fc type of heavy chains consisting of a scFv fragment fused to a first BEAT chain or as a heavy chain consisting of a FAB fragment fused to a first BEAT chain similar to that of a naturally occurring antibody. The FAB based heavy chain requires its association with its cognate light chain to assemble into a functional antigen binding site. L234A and L235A substitutions were introduced in CH2 regions and residual Protein A binding was abrogated within using the G65S or N82aS substitutions (Kabat numbering) when appropriate. An example of BEAT antibodies targeting both human CD19 antigen and human CD3 epsilon using anti-CD19 VH and VL sequences described in WO2010095031 is formatted as follows:

[0405] An example of BEAT CD19/CD3 is engineered using a combination of antigen binding sites described in Example 2.1 and 2.7 for the anti-human CD3 epsilon and the anti-human CD19 antigen binding sites, respectively.

[0406] The anti-human CD19 arm of the hetero-dimeric immunoglobulin consists of a BEAT heavy chain (SEQ ID NO: 330) encompassing a variable heavy chain region, a CH1 γ1 region, a γ1 hinge region, a γ3 CH2 region with L234A and L235A substitutions (EU numbering), and a γ3 based BEAT CH3 domain assembled with its cognate light chain (SEQ ID NO: 331). This heavy chain encompasses part of a human IgG3 Fc region and therefore has no binding to Protein A but since the heavy chain used herein has its heavy chain variable domain originating from a VH3 framework, the VH domain is mutated to include the G65S substitution thereby removing any additional Protein A binding sites within the heavy chain. The anti-human CD3 epsilon arm of the hetero-dimeric immunoglobulin consists of a BEAT heavy chain (SEQ ID NO: 311) encompassing a scFv fragment, a CH1 γ1 region, a γ1 hinge region, a γ1 CH2 region with L234A and L235A substitutions (EU numbering), and a γ1 based BEAT CH3 domain. This bispecific antibody is referred herein as BEAT CD19/CD3(SP34-Kappa2) antibody.

[0407] CD19 expressing cell lines described in PCT Publication No: WO2010/095031 are used to assess redirected T cell killing in assays similar to that of described in Example 3.2.1.

### Examples of IgE/CD3 BEAT Antibodies

[0408] Anti-IgE and anti-CD3 heavy chains can be formatted either as a scFv-Fc type of heavy chains consisting of a scFv fragment fused to a first BEAT chain or as a heavy chain consisting of a FAB fragment fused to a first BEAT chain similar to that of a naturally occurring antibody. The FAB based heavy chain requires its association with its cognate light chain to assemble into a functional antigen binding site. L234A and L235A substitutions were introduced in CH2 regions and residual Protein A binding was abrogated within using the G65S or N82aS substitutions (Kabat numbering) when appropriate.

[0409] BEAT IgE/CD3 antibodies are engineered using a combination of antigen binding sites described in Example 2.1 and 2.8 for the anti-human CD3 epsilon and the anti-human IgE antigen binding sites, respectively.

[0410] Cell lines expressing IgE on their cell surface are described in PCT Publication No: WO2010/033736 and can used to assess redirected T cell killing in assays similar to that of described in Example 3.2.1.

[0411] An example of BEAT antibodies targeting both human IgE antigen and human CD3 epsilon using the stabilized omalizumab/maxgraft VH and VL sequences is formatted as follows: The anti-human IgE arm of the hetero-dimeric immunoglobulin consists of a BEAT heavy chain (SEQ ID NO: 332) encompassing a variable heavy chain region, a CH1 γ1 region, a γ1 hinge region, a γ3 CH2 region with L234A and L235A substitutions (EU numbering), and a γ3 based BEAT CH3 domain assembled with its cognate light chain (SEQ ID NO: 333). This heavy chain encompasses part of a human IgG3 Fc region and therefore has no binding to Protein A but since the heavy chain used herein has its heavy chain variable domain originating from a VH3 framework, the VH domain is mutated to include the G65S substitution thereby removing any additional Protein A binding sites within the heavy chain. The anti-human CD3 epsilon arm of the hetero-dimeric immunoglobulin consists of a BEAT heavy chain (SEQ ID NO: 311) encompassing a scFv fragment, a CH1 γ1 region, a γ1 hinge region, a γ1 CH2 region with L234A and L235A substitutions (EU numbering), and a γ1 based BEAT CH3 domain. This bispecific antibody is referred herein as BEAT IgEomali-maxgraft/CD3(SP34-Kappa2) antibody.

[0412] Another example of BEAT antibodies targeting both human IgE antigen and human CD3 epsilon using the stabilized omalizumab/mingraft VH and VL sequences is formatted as follows:

[0413] The anti-human IgE arm of the hetero-dimeric immunoglobulin consists of a BEAT heavy chain (SEQ ID NO: 334) encompassing a variable heavy chain region, a CH1 γ1 region, a γ1 hinge region, a γ3 CH2 region with L234A and L235A substitutions (EU numbering), and a γ3 based BEAT CH3 domain assembled with its cognate light chain (SEQ ID NO: 335). This heavy chain encompasses part of a human IgG3 Fc region and therefore has no binding to Protein A but since the heavy chain used herein has its heavy chain variable domain originating from a VH3 framework, the VH domain is mutated to include the G65S substitution thereby removing any additional Protein A binding sites within the heavy chain. The anti-human CD3 epsilon arm of the hetero-dimeric immunoglobulin consists of a BEAT heavy chain (SEQ ID NO: 311) encompassing a scFv fragment, a CH1 γ1 region, a γ1 hinge region, a γ1 CH2 region with L234A and L235A substitutions (EU numbering), and a γ1 based BEAT CH3 domain. This bispecific antibody is referred herein as BEAT IgEomali-mingraft/CD3(SP34-Kappa2)antibody.

[0414] Another example of BEAT antibodies targeting both human IgE antigen and human CD3 epsilon using the stabilized Bsw17/maxgraft VH and VL sequences is formatted as follows: The anti-human IgE arm of the hetero-dimeric immunoglobulin consists of a BEAT heavy chain (SEQ ID NO: 336) encompassing a variable heavy chain region, a CH1 γ1 region, a γ1 hinge region, a γ3 CH2 region with L234A and L235A substitutions (EU numbering), and a γ3 based BEAT CH3 domain assembled with its cognate light chain (SEQ ID NO: 337). This heavy chain encompasses part of a human IgG3 Fc region and therefore has no binding to Protein A but since the heavy chain used herein has its heavy chain variable domain originating from a VH3 framework, the VH domain is mutated to include the G65S substitution thereby removing any additional Protein A binding sites within the heavy chain. The anti-human CD3 epsilon arm of the hetero-dimeric immunoglobulin consists of a BEAT heavy chain (SEQ ID NO: 311) encompassing a scFv fragment, a CH1 γ1 region, a γ1 hinge region, a γ1 CH2 region with L234A and L235A substitutions (EU numbering), and a γ1 based BEAT CH3 domain. This bispecific antibody is referred herein as BEAT IgEbsw17-maxgraft/CD3(SP34-Kappa2) antibody.

[0415] Another example of BEAT antibodies targeting both human IgE antigen and human CD3 epsilon using the stabilized Bsw17/mingraft VH and VL sequences is formatted as follows: The anti-human IgE arm of the hetero-dimeric immunoglobulin consists of a BEAT heavy chain (SEQ ID NO: 338) encompassing a variable heavy chain region, a CH1 γ1 region, a γ1 hinge region, a γ3 CH2 region with L234A and L235A substitutions (EU numbering), and a γ3 based BEAT CH3 domain assembled with its cognate light chain (SEQ ID NO: 339). This heavy chain encompasses part of a human IgG3 Fc region and therefore has no binding to Protein A but since the heavy chain used herein has its heavy chain variable domain originating from a VH3 framework, the VH domain is mutated to include the G65S substitution thereby removing any additional Protein A binding sites within the heavy chain. The anti-human CD3 epsilon arm of the hetero-dimeric immunoglobulin consists of a BEAT heavy chain (SEQ ID NO: 311) encompassing a scFv fragment, a CH1 γ1 region, a γ1 hinge region, a γ1 CH2 region with L234A and L235A substitutions (EU numbering), and a γ1 based BEAT CH3 domain. This bispecific antibody is referred herein as BEAT IgE bsw17-mingraft/CD3(SP34-Kappa2) antibody.

### Examples of BEAT Antibodies Encompassing Only One VH3 Domain

### Examples of CD38/CD3 Targeting BEAT Antibodies

[0416] An example of BEAT antibodies targeting both human CD38 antigen and human CD3 epsilon using the humanized HB7/bestfit VH and VL sequences was formatted as follows: a BEAT CD38/CD3 was engineered using a combination of antigen binding sites described in Example 2.1 and 2.3 for the anti-human CD3 epsilon and the anti-human CD38 arms, respectively. The anti-human CD38 arm of the hetero-dimeric immunoglobulin consisted of a BEAT heavy chain (SEQ ID NO: 176) encompassing a variable heavy chain domain, a CH1 γ1 region, a γ1 hinge region, a γ3 CH2 region with L234A and L235A substitutions (EU numbering), and a γ3 based BEAT CH3 domain assembled with its cognate light chain (SEQ ID NO: 119). This heavy chain had no binding to Protein A as it encompassed part of a human IgG3 Fc region and had its heavy chain variable domain originating from a non-VH3 domain subclass. The anti-human CD3 epsilon arm of the hetero-dimeric immunoglobulin consisted of a BEAT heavy chain (SEQ ID NO: 177) encompassing a scFv fragment, a CH1 γ1 region, a γ1 hinge region, a γ1 CH2 region with L234A and L235A substitutions (EU numbering), and a γ1 based BEAT CH3 domain. This heavy chain and light assembly encompassed a humanized version of the anti-human CD3 epsilon antibody (SP34) as described in PCT Publication No: WO2008119565. This BEAT antibody format is referred herein as BEAT CD38-HB7bestfit/CD3(SP34) antibody (FIG. 27 format A).

[0417] The ability of the BEAT CD38-HB7bestfit/CD3(SP34) antibody to redirect T cell killing towards CD38+ cells was investigated in-vitro. The CD38+B lymphoblast cell line Daudi was used in killing assays. FIG. 28 show T cell redirected killing of Daudi cells by the BEAT CD38-HB7bestfit/CD3(SP34) antibody. The assays used human PBMCs as effector cells with an effector cells to target cells ratio of 10 to 1, and the RDL-FACS readout method after a 24 h incubation period (see Materials and Methods section). The results show that the BEAT CD38-HB7bestfit/CD3(SP34) antibody was highly potent at redirecting T cell killing against the Daudi CD38+ cell line with an EC₅₀ of 1.8 pM (mean of 3 donors).

[0418] A second example of BEAT antibodies targeting both human CD38 antigen and human CD3 epsilon using the humanized 9G7 best-fit VH and VL sequences (SEQ ID NO: 129 and 130, respectively) was formatted as follows: a BEAT CD38/CD3 was engineered using a combination of antigen binding sites described in Example 2.1 and 2.3 for the anti-human CD3 epsilon and the anti-human CD38 arms, respectively. The anti-human CD38 arm of the hetero-dimeric immunoglobulin consisted of a BEAT heavy chain (SEQ ID NO: 178) encompassing a variable heavy chain domain, a CH1 γ1 region, a γ1 hinge region, a γ3 CH2 region with L234A and L235A substitutions (EU numbering), and a γ3 based BEAT CH3 domain assembled with its cognate light chain (SEQ ID NO: 128). This heavy chain had no binding to Protein A as it encompassed part of a human IgG3 Fc region and had its heavy chain variable domain originating from a non-VH3 domain subclass. The anti-human CD3 epsilon arm of the hetero-dimeric immunoglobulin consisted of a BEAT heavy chain (SEQ ID NO: 179) encompassing a scFv fragment, a CH1 γ1 region, a γ1 hinge region, a γ1 CH2 region with L234A and L235A substitutions (EU numbering), and a γ1 based BEAT CH3 domain. This arm of the bispecific antibody encompassed the variable domains of the humanized SP34 VH5/VL32 antibody described in Example 2.1. This BEAT antibody format is referred herein as BEAT CD38-9G7best-fit/CD3(SP34-Kappa2) antibody (FIG. 27 format B). CD38-9G7best-fit/CD3(SP34-Kappa2) antibody had a KD value of 18 nM for the human CD3 1-26_Fc fusion protein (FIG. 29).

[0419] The ability of the BEAT CD38-9G7best-fit/CD3(SP34-Kappa2) antibody to redirect T cell killing towards CD38+ cells was investigated in vitro. The CD38+B lymphoblast cell line Daudi was used in killing assays. FIG. 30 show T cell redirected killing of Daudi cells by the BEAT CD38-9G7best-fit/CD3(SP34-Kappa2) antibody. The assays used human PBMCs as effector cells with an effector cells to target cells ratio of 10 to 1, and the RDL-FACS readout method after a 24 h incubation period (see Materials and Methods section). The results show that the BEAT CD38-9G7best-fit/CD3(SP34-Kappa2) antibody was highly potent at redirecting T cell killing against the Daudi CD38+ cell line with an EC₅₀ of 2 pM (mean of 3 donors).

### Examples of OX40/CD3 Targeting BEAT Antibodies

[0420] An example of BEAT antibodies targeting both human OX40 antigen and human CD3 epsilon using the humanized anti-OX40 antibody VH and VL sequences (PCT Publication No: WO2013008171) is formatted as follows:

[0421] A BEAT OX40/CD3 is engineered using a combination of antigen binding sites described in Example 2.1 and 2.4 for the anti-human CD3 epsilon and the anti-human OX40 antigen binding sites, respectively.

[0422] The anti-human OX40 arm of the hetero-dimeric immunoglobulin consists of a BEAT heavy chain (SEQ ID NO: 340) encompassing a variable heavy chain region, a CH1 γ1 region, a γ1 hinge region, a γ3 CH2 region with L234A and L235A substitutions (EU numbering), and a γ3 based BEAT CH3 domain assembled with its cognate light chain (SEQ ID NO: 173). This heavy chain has no binding to Protein A as it encompasses part of a human IgG3 Fc region and has its heavy chain variable domain originating from a non-VH3 domain subclass. The anti-human CD3 epsilon arm of the hetero-dimeric immunoglobulin consists of a BEAT heavy chain (SEQ ID NO: 311) encompassing a scFv fragment, a CH1 γ1 region, a γ1 hinge region, a γ1 CH2 region with L234A and L235A substitutions (EU numbering), and a γ1 based BEAT CH3 domain. This bispecific antibody is referred herein as BEAT OX40/CD3(SP34-Kappa2) antibody.

[0423] Human OX40 expressing cell lines described above are used to assess redirected T cell killing in assays similar to that of described in Example 3.2.4.

### Examples of CD20/CD3 Targeting BEAT Antibodies

[0424] An example of BEAT antibodies targeting both human CD20 antigen and human CD3 epsilon using the mouse rituximab antibody VH and VL sequences was formatted as follows: A BEAT CD20/CD3 was engineered using a combination of antigen binding sites described in Example 2.1 and 2.5 for the anti-human CD3 epsilon and the anti-human CD20 arms, respectively.

[0425] The anti-human CD20 arm of the hetero-dimeric immunoglobulin consisted of a BEAT heavy chain (SEQ ID NO: 180) based on the mouse rituximab antibody variable domains (mouse variable heavy and light chain domains with SEQ ID NO: 143 and 144, respectively) that encompassed a variable heavy chain region, a CH1 γ1 region, a γ1 hinge region, a γ3 CH2 region with L234A and L235A substitutions (EU numbering), and a γ3 based BEAT CH3 domain assembled with its cognate light chain (SEQ ID NO: 181). This heavy chain had no binding to Protein A as it encompassed part of a human IgG3 Fc region and had its heavy chain variable domain originating from a non-VH3 domain subclass.

[0426] The anti-human CD3 epsilon arm of the hetero-dimeric immunoglobulin consisted of a BEAT heavy chain (SEQ ID NO: 177) encompassing a scFv fragment, a CH1 γ1 region, a γ1 hinge region, a γ1 CH2 region with L234A and L235A substitutions (EU numbering), and a γ1 based BEAT CH3 domain. This arm is equivalent to the BEAT CD38-HB7bestfit/CD3 anti-CD3 epsilon arm described above (see FIG. 27 format A). This scFv fragment encompassed a humanized version of the anti-human CD3 epsilon SP34 antibody as described in PCT Publication No: WO2008119565 (VH and VL domains with SEQ ID NO: 182 and 183, respectively). This BEAT antibody format is referred herein as BEAT CD20/CD3(SP34) antibody (FIG. 31).

[0427] The BEAT CD20/CD3(SP34) antibody was transiently expressed, purified and tested in vitro for its ability to redirect T cell killing against human CD20+ cell lines. The CD38+B lymphoblast cell line Daudi was used in killing assays. FIG. 32 show T cell redirected killing of Daudi cells by the BEAT CD20/CD3(SP34) antibody. The assays used human PBMCs as effector cells with an effector cells to target cells ratio of 10 to 1, and the RDL-FACS readout method after a 24 h incubation period (see Materials and Methods section). The results show that the BEAT CD20/CD3(SP34) antibody was highly potent at redirecting T cell killing against Daudi cells with an EC₅₀ of 25 pM (mean of 3 donors).

[0428] Another example of BEAT antibodies targeting both human CD20 antigen and human CD3 epsilon using the chimeric rituximab antibody VH and VL sequences is formatted as follows: a BEAT EGFR/CD3 is engineered using a combination of antigen binding sites described in Example 2.1 and 2.5 for the anti-human CD3 epsilon and the anti-human CD20 antigen binding sites, respectively.

[0429] The anti-human CD20 arm of the hetero-dimeric immunoglobulin consists of a BEAT heavy chain (SEQ ID NO: 341) encompassing a variable heavy chain region, a CH1 γ1 region, a γ1 hinge region, a γ3 CH2 region with L234A and L235A substitutions (EU numbering), and a γ3 based BEAT CH3 domain assembled with its cognate light chain (SEQ ID NO: 181). This heavy chain has no binding to Protein A as it encompasses part of a human IgG3 Fc region and has its heavy chain variable domain originating from a non-VH3 domain subclass. The anti-human CD3 epsilon arm of the hetero-dimeric immunoglobulin consists of a BEAT heavy chain (SEQ ID NO: 311) encompassing a scFv fragment, a CH1 γ1 region, a γ1 hinge region, a γ1 CH2 region with L234A and L235A substitutions (EU numbering), and a γ1 based BEAT CH3 domain. This bispecific antibody is referred herein as BEAT CD20/CD3(SP34-Kappa2) antibody.

### Examples of EGFR/CD3 Targeting BEAT Antibodies

[0430] An example of BEAT antibodies targeting both human EGFR antigen and human CD3 epsilon using the mouse Erbitux antibody VH and VL sequences is formatted as follows: a BEAT EGFR/CD3 is engineered using a combination of antigen binding sites described in Example 2.1 and 2.6 for the anti-human CD3 epsilon and the anti-human EGFR antigen binding sites, respectively.

[0431] The anti-human EGFR arm of the hetero-dimeric immunoglobulin consists of a BEAT heavy chain (SEQ ID NO: 342) encompassing a variable heavy chain region, a CH1 γ1 region, a γ1 hinge region, a γ3 CH2 region with L234A and L235A substitutions (EU numbering), and a γ3 based BEAT CH3 domain assembled with its cognate light chain (SEQ ID NO: 175). This heavy chain has no binding to Protein A as it encompasses part of a human IgG3 Fc region and has its heavy chain variable domain originating from a non-VH3 domain subclass.

[0432] The anti-human CD3 epsilon arm of the hetero-dimeric immunoglobulin consists of a BEAT heavy chain (SEQ ID NO: 311) encompassing a scFv fragment, a CH1 γ1 region, a γ1 hinge region, a γ1 CH2 region with L234A and L235A substitutions (EU numbering), and a γ1 based BEAT CH3 domain. This bispecific antibody is referred herein as BEAT EGFRcetux/CD3(SP34-Kappa2) antibody.

[0433] Another example of BEAT antibodies targeting both human EGFR antigen and human CD3 epsilon using the human Vectibix antibody VH and VL sequences is formatted as follows: a BEAT EGFR/CD3 is engineered using a combination of antigen binding sites described in Example 2.1 and 2.6 for the anti-human CD3 epsilon and the anti-human EGFR antigen binding sites, respectively.

[0434] The anti-human EGFR arm of the hetero-dimeric immunoglobulin consists of a BEAT heavy chain (SEQ ID NO: 343) encompassing a variable heavy chain region, a CH1 γ1 region, a γ1 hinge region, a γ3 CH2 region with L234A and L235A substitutions (EU numbering), and a γ3 based BEAT CH3 domain assembled with its cognate light chain (SEQ ID NO: 344). This heavy chain has no binding to Protein A as it encompasses part of a human IgG3 Fc region and has its heavy chain variable domain originating from a non-VH3 domain subclass.

[0435] The anti-human CD3 epsilon arm of the hetero-dimeric immunoglobulin consists of a BEAT heavy chain (SEQ ID NO: 311) encompassing a scFv fragment, a CH1 γ1 region, a γ1 hinge region, a γ1 CH2 region with L234A and L235A substitutions (EU numbering), and a γ1 based BEAT CH3 domain. This bispecific antibody is referred herein as BEAT EGFRpani/CD3(SP34-Kappa2) antibody.

### Examples of IgE/CD3 Targeting BEAT Antibodies

[0436] An example of BEAT antibodies targeting both human IgE antigen and human CD3 epsilon using the humanized omalizumab antibody VH and VL sequences is formatted as follows: a BEAT IgE/CD3 is engineered using a combination of antigen binding sites described in Example 2.1 and 2.8 for the anti-human CD3 epsilon and the anti-human IgE antigen binding sites, respectively.

[0437] The anti-human IgE arm of the hetero-dimeric immunoglobulin consists of a BEAT heavy chain (SEQ ID NO: 345) encompassing a variable heavy chain region, a CH1 γ1 region, a γ1 hinge region, a γ3 CH2 region with L234A and L235A substitutions (EU numbering), and a γ3 based BEAT CH3 domain assembled with its cognate light chain (SEQ ID NO: 346). This heavy chain has no binding to Protein A as it encompasses part of a human IgG3 Fc region and has its heavy chain variable domain originating from a non-VH3 domain subclass. The anti-human CD3 epsilon arm of the hetero-dimeric immunoglobulin consists of a BEAT heavy chain (SEQ ID NO: 311) encompassing a scFv fragment, a CH1 γ1 region, a γ1 hinge region, a γ1 CH2 region with L234A and L235A substitutions (EU numbering), and a γ1 based BEAT CH3 domain. This bispecific antibody is referred herein as BEAT IgEomali/CD3(SP34-Kappa2) antibody.

[0438] Another example of BEAT antibodies targeting both human IgE antigen and human CD3 epsilon using the mouse Bsw17 antibody VH and VL sequences is formatted as follows: a BEAT IgE/CD3 is engineered using a combination of antigen binding sites described in Example 2.1 and 2.8 for the anti-human CD3 epsilon and the anti-human IgE antigen binding sites, respectively.

[0439] The anti-human IgE arm of the hetero-dimeric immunoglobulin consists of a BEAT heavy chain (SEQ ID NO: 347) encompassing a variable heavy chain region, a CH1 γ1 region, a γ1 hinge region, a γ3 CH2 region with L234A and L235A substitutions (EU numbering), and a γ3 based BEAT CH3 domain assembled with its cognate light chain (SEQ ID NO: 348). This heavy chain has no binding to Protein A as it encompasses part of a human IgG3 Fc region and has its heavy chain variable domain originating from a non-VH3 domain subclass. The anti-human CD3 epsilon arm of the hetero-dimeric immunoglobulin consists of a BEAT heavy chain (SEQ ID NO: 311) encompassing a scFv fragment, a CH1 γ1 region, a γ1 hinge region, a γ1 CH2 region with L234A and L235A substitutions (EU numbering), and a γ1 based BEAT CH3 domain. This bispecific antibody is referred herein as BEAT IgEbsw17/CD3(SP34-Kappa2) antibody.

[0440] Membrane IgE expressing cell lines described are used to assess redirected T cell killing in assays similar to that of described above.

Functional Equivalence of Improved SP34 in scFv Format

[0441] Bispecific CD38×CD3 Antibody

[0442] In order to determine whether of the modifications made to the various SP34 scFv so as to improve their expression also affected the functional properties, namely the binding of CD3, they were tested in the context of a CD38×CD3 bispecific. The CD38 binding arm present as a FAB, comprises the heavy chain variable region encoded by SEQ ID NO: 133 and the light chain variable region encoded by SEQ ID NO: 134. The CD3 binding arm comprises the original mouse SP34 reformatted as an scFv (SEQ ID NO: 403), or modified humanised SP34 scFv's comprising the heavy/light chain combinations H1/L21 (SEQ ID NO: 361), H5/L32 (SEQ ID NO: 311), H5/L65 (SEQ ID NO: 394) and H5/L67 (SEQ ID NO: 396).

[0443] Each of the CD3/CD38 BEAT using the different version of SP34 were transiently expressed and purified. They were tested in vitro to compare their ability to redirect T cell killing. Raji CD38 expressing cell line (see Materials and Methods section) was used to assess redirected T cell killing. The assay used human PBMCs as effector cells with an effector cells to target cells ratio of 10:1.

[0444] When measured with the RDL-FACS method, all BEAT showed comparable EC50 between 6 and 10 pM (the mean of 2 donors, 24 h incubation) FIG. 37.

[0445] Bispecific CD20×CD3 Antibody

[0446] The properties of a SP34 scFv comprising the H5/L65 heavy chain/light chain combinations (SEQ ID NO: 394) was also tested in conjunction with a CD20 FAB binding arm, Rituximab, VH and VL domains with SEQ ID NO: 282 and 283, respectively.

[0447] The CD3/CD20 BEAT was transiently expressed and purified, then tested in vitro to compare their ability to redirect T cell killing. Raji CD20 expressing cell line (see Materials and Methods section) was used to assess redirected T cell killing. The assay used human PBMCs as effector cells with an effector cells to target cells ratio of 5:1 incubated for 24 hours.

[0448] When measured with the RDL-FACS method, all BEAT showed a comparable EC50 of 37.56 pM (the mean of 4 donors, 24 h incubation) FIG. 38, to CD3×CD20 BEATs which comprised H1/L21 (SEQ ID NO: 361), see above.

[0449] Bispecific EGFR×CD3 Antibody

[0450] Erbitux/CD3

[0451] Patients carrying KRAS mutations show no benefit from treatment with the monoclonal antibody Cetuximab (trade name Erbitux) (Karapetis C et al., N Engl J Med 359: 1757 (2008).

[0452] To further evaluate the properties of the improved SP34 scFv and to establish that it is possible to kill high EGFR expressing cell lines and overcome the KRAS resistance, a bispecific Erbitux (Heavy Chain SEQ ID NO: 174 and Light Chain SEQ ID NO: 175)-hSP34 (SEQ ID NO: 394) BEAT was constructed, an in vitro redirected T-cell lysis assay was performed on the KRAS mutated cancer cell lines A549 (lung) and HCT116 (colorectal cancer). Additionally, to demonstrate that Erbitux-hSP34 kills only cells displaying high and medium expression levels of EGFR and not low EGFR expressing cells, the low EGFR expressing cell line MCF-7 was also included in the assay. The EGFR status of the cell lines was determined using the EGFR PharmDx immunohistochemistry kit (Table 2).

TABLE 2

| Cell line | Average of sABC |
|---|---|
| A549 | 182′454 |
| HCT116 | 44′294 |
| MCF-7 | 5′644 |

[0453] Mg was added at 2.5 mg/mL to each well to block Erbitux effector function to better mimic the mode of action of Erbitux, which is inhibition of EGFR signalling. As shown in FIG. 39. Erbitux has no effect on any of the cell lines (Not possible to assess any EC₅₀).

[0454] On the contrary, as shown in FIG. 40, Erbitux/hSP34 BEAT can effectively kill KRAS mutated A549 and HCT116 tumour cells with EC50's of 66.97 pM and 43.3 pM respectively while lower EGFR expressing MCF-7 cells are not efficiently killed.

[0455] Vectibix

[0456] To further evaluate the properties of the improved SP34 scFv and to further establish that it is possible can kill high EGFR expressing cell lines and overcome the KRAS resistance mechanism with a bispecific Vectibix (VL SEQ ID NO: 291 and VH SEQ ID NO: 290) as a FAB-hSP34 BEAT (SEQ ID NO: 394) As ScFv, an in vitro redirected T-cell lysis assay was performed on the high EGFR expressing lung cancer cell line HCC827 as well as on the KRAS mutated lung cancer cell line A549 and colorectal cancer KRAS positive cell lines HCT116 and SW480.

[0457] To demonstrate that Vectibix/hSP34 BEAT kills only cells displaying high and medium expression levels of EGFR and not low EGFR expressing cells, the low EGFR expressing cell line MCF-7 was also included in the killing assay. The EGFR status of the cell lines (FIG. 41 was determined using the EGFR PharmDx immunohistochemistry kit (Dako, Cambridge, UK).

[0458] As shown in FIG. 42, Vectibix has no effect on any of the cell lines assessed (mean of 2 donors and effector:target cell ratio 20 to 1. Read out: after 48 hours with MTS.).

[0459] For the Vectibix/hSP34 BEAT an effector:target cell ratio of 10:1 was used and data are presented as the mean of 4 donors.

[0460] As shown in FIG. 43, the Vectibix/hSP34 BEAT can effectively kill high EGFR expressing cell line HCC827 and KRAS mutated A549, HCT116 and SW480 tumour cells with EC50's of 0.1557, 0.6127, 0.3406 and 6.986 pM respectively while lower EGFR expressing MCF-7 cells are not efficiently killed (EC50=627.4 pM).

TABLE 3

| EC₅₀s | HCC827 | HCT116 | SW480 | MCF7 |
|---|---|---|---|---|
| Vectibix-CD3 | 0.1457 | 0.3406 | 6.986 | 627.4 |
| EC₅₀ (X)/EC₅₀ | / | 2.3 | 47.9 | 4303 |
| (HCC827) Vectibix-CD3 | | | | |

[0461] In Table 3, the mean EC50's of 4 donors were determined and the therapeutic window calculated (EC₅₀(X)/EC₅₀(HCC827)Vectibix-CD3).

The application's sequence listing, which the Patent Office published only in electronic form, follows.

SEQUENCE LISTING (403 sequences)

SEQ ID NO: 1 - protein, 227 aa, Artificial Sequence
  SEQ ID NO: 1 - Fc 133
DKTHTCPPCPAPELLGGPSVFLFPPKPKDTLMISRTPEVTCVVVDVSHEDPEVQFKWYVDGVEVHNAKTKPREEQYNSTFRVVSVLTVLHQDWLNGKEYKCKVSNKALPAPIEKTISKTKGQPREPQVYTLPPSREEMTKNQVSLTCLVKGFYPSDIAVEWESSGQPENNYNTTPPMLDSDGSFFLYSKLTVDKSRWQQGNIFSCSVMHEALHNRFTQKSLSLSPGK

SEQ ID NO: 2 - protein, 450 aa, Artificial Sequence
  SEQ ID NO: 2 - anti-HER2 FAB-Fc 133 heavy chain
EVQLVESGGGLVQPGGSLRLSCAASGFNIKDTYIHWVRQAPGKGLEWVARIYPTNGYTRYADSVKGRFTISADTSKNTAYLQMNSLRAEDTAVYYCSRWGGDGFYAMDYWGQGTLVTVSSASTKGPSVFPLAPSSKSTSGGTAALGCLVKDYFPEPVTVSWNSGALTSGVHTFPAVLQSSGLYSLSSVVTVPSSSLGTQTYICNVNHKPSNTKVDKKVEPKSCDKTHTCPPCPAPELLGGPSVFLFPPKPKDTLMISRTPEVTCVVVDVSHEDPEVQFKWYVDGVEVHNAKTKPREEQYNSTFRVVSVLTVLHQDWLNGKEYKCKVSNKALPAPIEKTISKTKGQPREPQVYTLPPSREEMTKNQVSLTCLVKGFYPSDIAVEWESSGQPENNYNTTPPMLDSDGSFFLYSKLTVDKSRWQQGNIFSCSVMHEALHNRFTQKSLSLSPGK

SEQ ID NO: 3 - protein, 214 aa, Artificial Sequence
  SEQ ID NO: 3 - anti-HER2 light chain
DIQMTQSPSSLSASVGDRVTITCRASQDVNTAVAWYQQKPGKAPKLLIYSASFLYSGVPSRFSGSRSGTDFTLTISSLQPEDFATYYCQQHYTTPPTFGQGTKVEIKRTVAAPSVFIFPPSDEQLKSGTASVVCLLNNFYPREAKVQWKVDNALQSGNSQESVTEQDSKDSTYSLSSTLTLSKADYEKHKVYACEVTHQGLSSPVTKSFNRGEC

SEQ ID NO: 4 - protein, 475 aa, Artificial Sequence
  SEQ ID NO: 4 - anti-HER2 scFv-Fc 133
EVQLVESGGGLVQPGGSLRLSCAASGFNIKDTYIHWVRQAPGKGLEWVARIYPTNGYTRYADSVKGRFTISADTSKNTAYLQMNSLRAEDTAVYYCSRWGGDGFYAMDYWGQGTLVTVSSGGGGSGGGGSGGGGSDIQMTQSPSSLSASVGDRVTITCRASQDVNTAVAWYQQKPGKAPKLLIYSASFLYSTVPSRFSGSRSGTDFTLTISSLQPEDFATYYCQQHYTTPPTFGQGTKVEIKRGGGGTDKTHTCPPCPAPELLGGPSVFLFPPKPKDTLMISRTPEVTCVVVDVSHEDPEVQFKWYVDGVEVHNAKTKPREEQYNSTFRVVSVLTVLHQDWLNGKEYKCKVSNKALPAPIEKTISKTKGQPREPQVYTLPPSREEMTKNQVSLTCLVKGFYPSDIAVEWESSGQPENNYNTTPPMLDSDGSFFLYSKLTVDKSRWQQGNIFSCSVMHEALHNRFTQKSLSLSPGK

SEQ ID NO: 5 - protein, 223 aa, Artificial Sequence
  SEQ ID NO: 5 - anti-HER2 FAB heavy chain
EVQLVESGGGLVQPGGSLRLSCAASGFNIKDTYIHWVRQAPGKGLEWVARIYPTNGYTRYADSVKGRFTISADTSKNTAYLQMNSLRAEDTAVYYCSRWGGDGFYAMDYWGQGTLVTVSSASTKGPSVFPLAPSSKSTSGGTAALGCLVKDYFPEPVTVSWNSGALTSGVHTFPAVLQSSGLYSLSSVVTVPSSSLGTQTYICNVNHKPSNTKVDKKVEPKSC

SEQ ID NO: 6 - protein, 223 aa, Artificial Sequence
  SEQ ID NO: 6 - anti-HER2 FAB G65S heavy chain
EVQLVESGGGLVQPGGSLRLSCAASGFNIKDTYIHWVRQAPGKGLEWVARIYPTNGYTRYADSVKSRFTISADTSKNTAYLQMNSLRAEDTAVYYCSRWGGDGFYAMDYWGQGTLVTVSSASTKGPSVFPLAPSSKSTSGGTAALGCLVKDYFPEPVTVSWNSGALTSGVHTFPAVLQSSGLYSLSSVVTVPSSSLGTQTYICNVNHKPSNTKVDKKVEPKSC

SEQ ID NO: 7 - protein, 223 aa, Artificial Sequence
  SEQ ID NO: 7 - anti-HER2 FAB R66Q heavy chain
EVQLVESGGGLVQPGGSLRLSCAASGFNIKDTYIHWVRQAPGKGLEWVARIYPTNGYTRYADSVKGQFTISADTSKNTAYLQMNSLRAEDTAVYYCSRWGGDGFYAMDYWGQGTLVTVSSASTKGPSVFPLAPSSKSTSGGTAALGCLVKDYFPEPVTVSWNSGALTSGVHTFPAVLQSSGLYSLSSVVTVPSSSLGTQTYICNVNHKPSNTKVDKKVEPKSC

SEQ ID NO: 8 - protein, 223 aa, Artificial Sequence
  SEQ ID NO: 8 - anti-HER2 FAB T68V heavy chain
EVQLVESGGGLVQPGGSLRLSCAASGFNIKDTYIHWVRQAPGKGLEWVARIYPTNGYTRYADSVKGRFVISADTSKNTAYLQMNSLRAEDTAVYYCSRWGGDGFYAMDYWGQGTLVTVSSASTKGPSVFPLAPSSKSTSGGTAALGCLVKDYFPEPVTVSWNSGALTSGVHTFPAVLQSSGLYSLSSVVTVPSSSLGTQTYICNVNHKPSNTKVDKKVEPKSC

SEQ ID NO: 9 - protein, 223 aa, Artificial Sequence
  SEQ ID NO: 9 - anti-HER2 FAB Q81E heavy chain
EVQLVESGGGLVQPGGSLRLSCAASGFNIKDTYIHWVRQAPGKGLEWVARIYPTNGYTRYADSVKGRFTISADTSKNTAYLEMNSLRAEDTAVYYCSRWGGDGFYAMDYWGQGTLVTVSSASTKGPSVFPLAPSSKSTSGGTAALGCLVKDYFPEPVTVSWNSGALTSGVHTFPAVLQSSGLYSLSSVVTVPSSSLGTQTYICNVNHKPSNTKVDKKVEPKSC

SEQ ID NO: 10 - protein, 223 aa, Artificial Sequence
  SEQ ID NO: 10 - anti-HER2 FAB N82aS heavy chain
EVQLVESGGGLVQPGGSLRLSCAASGFNIKDTYIHWVRQAPGKGLEWVARIYPTNGYTRYADSVKGRFTISADTSKNTAYLQMSSLRAEDTAVYYCSRWGGDGFYAMDYWGQGTLVTVSSASTKGPSVFPLAPSSKSTSGGTAALGCLVKDYFPEPVTVSWNSGALTSGVHTFPAVLQSSGLYSLSSVVTVPSSSLGTQTYICNVNHKPSNTKVDKKVEPKSC

SEQ ID NO: 11 - protein, 223 aa, Artificial Sequence
  SEQ ID NO: 11 - anti-HER2 FAB R19G/T57A/Y59A heavy chain
EVQLVESGGGLVQPGGSLGLSCAASGFNIKDTYIHWVRQAPGKGLEWVARIYPTNGYARAADSVKGRFTISADTSKNTAYLQMNSLRAEDTAVYYCSRWGGDGFYAMDYWGQGTLVTVSSASTKGPSVFPLAPSSKSTSGGTAALGCLVKDYFPEPVTVSWNSGALTSGVHTFPAVLQSSGLYSLSSVVTVPSSSLGTQTYICNVNHKPSNTKVDKKVEPKSC

SEQ ID NO: 12 - protein, 223 aa, Artificial Sequence
  SEQ ID NO: 12 - anti-HER2 FAB T57A heavy chain
EVQLVESGGGLVQPGGSLRLSCAASGFNIKDTYIHWVRQAPGKGLEWVARIYPTNGYARYADSVKGRFTISADTSKNTAYLQMNSLRAEDTAVYYCSRWGGDGFYAMDYWGQGTLVTVSSASTKGPSVFPLAPSSKSTSGGTAALGCLVKDYFPEPVTVSWNSGALTSGVHTFPAVLQSSGLYSLSSVVTVPSSSLGTQTYICNVNHKPSNTKVDKKVEPKSC

SEQ ID NO: 13 - protein, 223 aa, Artificial Sequence
  SEQ ID NO: 13 - anti-HER2 FAB T57E heavy chain
EVQLVESGGGLVQPGGSLRLSCAASGFNIKDTYIHWVRQAPGKGLEWVARIYPTNGYERYADSVKGRFTISADTSKNTAYLQMNSLRAEDTAVYYCSRWGGDGFYAMDYWGQGTLVTVSSASTKGPSVFPLAPSSKSTSGGTAALGCLVKDYFPEPVTVSWNSGALTSGVHTFPAVLQSSGLYSLSSVVTVPSSSLGTQTYICNVNHKPSNTKVDKKVEPKSC

SEQ ID NO: 14 - protein, 475 aa, Artificial Sequence
  SEQ ID NO: 14 - anti-HER2 scFv(G65S)-Fc 133 heavy chain
EVQLVESGGGLVQPGGSLRLSCAASGFNIKDTYIHWVRQAPGKGLEWVARIYPTNGYTRYADSVKSRFTISADTSKNTAYLQMNSLRAEDTAVYYCSRWGGDGFYAMDYWGQGTLVTVSSGGGGSGGGGSGGGGSDIQMTQSPSSLSASVGDRVTITCRASQDVNTAVAWYQQKPGKAPKLLIYSASFLYSTVPSRFSGSRSGTDFTLTISSLQPEDFATYYCQQHYTTPPTFGQGTKVEIKRGGGGTDKTHTCPPCPAPELLGGPSVFLFPPKPKDTLMISRTPEVTCVVVDVSHEDPEVQFKWYVDGVEVHNAKTKPREEQYNSTFRVVSVLTVLHQDWLNGKEYKCKVSNKALPAPIEKTISKTKGQPREPQVYTLPPSREEMTKNQVSLTCLVKGFYPSDIAVEWESSGQPENNYNTTPPMLDSDGSFFLYSKLTVDKSRWQQGNIFSCSVMHEALHNRFTQKSLSLSPGK

SEQ ID NO: 15 - protein, 475 aa, Artificial Sequence
  SEQ ID NO: 15 - anti-HER2 scFv(N82aS)-Fc 133 heavy chain
EVQLVESGGGLVQPGGSLRLSCAASGFNIKDTYIHWVRQAPGKGLEWVARIYPTNGYTRYADSVKGRFTISADTSKNTAYLQMSSLRAEDTAVYYCSRWGGDGFYAMDYWGQGTLVTVSSGGGGSGGGGSGGGGSDIQMTQSPSSLSASVGDRVTITCRASQDVNTAVAWYQQKPGKAPKLLIYSASFLYSTVPSRFSGSRSGTDFTLTISSLQPEDFATYYCQQHYTTPPTFGQGTKVEIKRGGGGTDKTHTCPPCPAPELLGGPSVFLFPPKPKDTLMISRTPEVTCVVVDVSHEDPEVQFKWYVDGVEVHNAKTKPREEQYNSTFRVVSVLTVLHQDWLNGKEYKCKVSNKALPAPIEKTISKTKGQPREPQVYTLPPSREEMTKNQVSLTCLVKGFYPSDIAVEWESSGQPENNYNTTPPMLDSDGSFFLYSKLTVDKSRWQQGNIFSCSVMHEALHNRFTQKSLSLSPGK

SEQ ID NO: 16 - protein, 450 aa, Artificial Sequence
  SEQ ID NO: 16 - anti-HER2 FAB(G65S)-Fc 133 heavy chain
EVQLVESGGGLVQPGGSLRLSCAASGFNIKDTYIHWVRQAPGKGLEWVARIYPTNGYTRYADSVKSRFTISADTSKNTAYLQMNSLRAEDTAVYYCSRWGGDGFYAMDYWGQGTLVTVSSASTKGPSVFPLAPSSKSTSGGTAALGCLVKDYFPEPVTVSWNSGALTSGVHTFPAVLQSSGLYSLSSVVTVPSSSLGTQTYICNVNHKPSNTKVDKKVEPKSCDKTHTCPPCPAPELLGGPSVFLFPPKPKDTLMISRTPEVTCVVVDVSHEDPEVQFKWYVDGVEVHNAKTKPREEQYNSTFRVVSVLTVLHQDWLNGKEYKCKVSNKALPAPIEKTISKTKGQPREPQVYTLPPSREEMTKNQVSLTCLVKGFYPSDIAVEWESSGQPENNYNTTPPMLDSDGSFFLYSKLTVDKSRWQQGNIFSCSVMHEALHNRFTQKSLSLSPGK

SEQ ID NO: 17 - protein, 450 aa, Artificial Sequence
  SEQ ID NO: 17 - anti-HER2 FAB(N82aS)-Fc 133 heavy chain
EVQLVESGGGLVQPGGSLRLSCAASGFNIKDTYIHWVRQAPGKGLEWVARIYPTNGYTRYADSVKGRFTISADTSKNTAYLQMSSLRAEDTAVYYCSRWGGDGFYAMDYWGQGTLVTVSSASTKGPSVFPLAPSSKSTSGGTAALGCLVKDYFPEPVTVSWNSGALTSGVHTFPAVLQSSGLYSLSSVVTVPSSSLGTQTYICNVNHKPSNTKVDKKVEPKSCDKTHTCPPCPAPELLGGPSVFLFPPKPKDTLMISRTPEVTCVVVDVSHEDPEVQFKWYVDGVEVHNAKTKPREEQYNSTFRVVSVLTVLHQDWLNGKEYKCKVSNKALPAPIEKTISKTKGQPREPQVYTLPPSREEMTKNQVSLTCLVKGFYPSDIAVEWESSGQPENNYNTTPPMLDSDGSFFLYSKLTVDKSRWQQGNIFSCSVMHEALHNRFTQKSLSLSPGK

SEQ ID NO: 18 - protein, 119 aa, Artificial Sequence [sequence omitted]

SEQ ID NO: 19 - protein, 106 aa, Artificial Sequence [sequence omitted]

SEQ ID NO: 20 - protein, 120 aa, Artificial Sequence [sequence omitted]

SEQ ID NO: 21 - protein, 107 aa, Artificial Sequence [sequence omitted]

SEQ ID NO: 22 - protein, 98 aa, Homo sapiens
EVQLVESGGGLVQPGGSLRLSCAASGFTFSSYAMSWVRQAPGKGLEWVSAISGSGGSTYYADSVKGRFTISRDNSKNTLYLQMNSLRAEDTAVYYCAK

SEQ ID NO: 23 - protein, 95 aa, Homo sapiens
DIQMTQSPSSLSASVGDRVTITCRASQSISSYLNWYQQKPGKAPKLLIYAASSLQSGVPSRFSGSGSGTDFTLTISSLQPEDFATYYCQQSYSTP

SEQ ID NO: 24 - protein, 96 aa, Homo sapiens
EIVLTQSPGTLSLSPGERATLSCRASQSVSSSYLAWYQQKPGQAPRLLIYGASSRATGIPDRFSGSGSGTDFTLTISRLEPEDFAVYYCQQYGSSP

SEQ ID NO: 25 - protein, 449 aa, Artificial Sequence
  SEQ ID NO: 25 - Chimeric OKT3 heavy chain IgG1
QVQLQQSGAELARPGASVKMSCKASGYTFTRYTMHWVKQRPGQGLEWIGYINPSRGYTNYNQKFKDKATLTTDKSSSTAYMQLSSLTSEDSAVYYCARYYDDHYCLDYWGQGTTLTVSSASTKGPSVFPLAPSSKSTSGGTAALGCLVKDYFPEPVTVSWNSGALTSGVHTFPAVLQSSGLYSLSSVVTVPSSSLGTQTYICNVNHKPSNTKVDKKVEPKSCDKTHTCPPCPAPELLGGPSVFLFPPKPKDTLMISRTPEVTCVVVDVSHEDPEVKFNWYVDGVEVHNAKTKPREEQYNSTYRVVSVLTVLHQDWLNGKEYKCKVSNKALPAPIEKTISKAKGQPREPQVYTLPPSRDELTKNQVSLTCLVKGFYPSDIAVEWESNGQPENNYKTTPPVLDSDGSFFLYSKLTVDKSRWQQGNVFSCSVMHEALHNHYTQKSLSLSPGK

SEQ ID NO: 26 - protein, 213 aa, Artificial Sequence
  SEQ ID NO: 26 - Chimeric OKT3 human kappa light chain
QIVLTQSPAIMSASPGEKVTMTCSASSSVSYMNWYQQKSGTSPKRWIYDTSKLASGVPAHFRGSGSGTSYSLTISGMEAEDAATYYCQQWSSNPFTFGSGTKLEINRTVAAPSVFIFPPSDEQLKSGTASVVCLLNNFYPREAKVQWKVDNALQSGNSQESVTEQDSKDSTYSLSSTLTLSKADYEKHKVYACEVTHQGLSSPVTKSFNRGEC

SEQ ID NO: 27 - protein, 449 aa, Artificial Sequence
  SEQ ID NO: 27 - OKT3 humanized heavy chain with VH domain
EVQLVESGGGLVQPGGSLRLSCAASGYTFTRYTIHWVRQAPGKGLEWVAYINPSRGYTRYADSVKGRFTISADTSKNTAYLQMNSLRAEDTAVYYCARYYDDHYCLDYWGQGTLVTVSSASTKGPSVFPLAPSSKSTSGGTAALGCLVKDYFPEPVTVSWNSGALTSGVHTFPAVLQSSGLYSLSSVVTVPSSSLGTQTYICNVNHKPSNTKVDKKVEPKSCDKTHTCPPCPAPELLGGPSVFLFPPKPKDTLMISRTPEVTCVVVDVSHEDPEVKFNWYVDGVEVHNAKTKPREEQYNSTYRVVSVLTVLHQDWLNGKEYKCKVSNKALPAPIEKTISKAKGQPREPQVYTLPPSRDELTKNQVSLTCLVKGFYPSDIAVEWESNGQPENNYKTTPPVLDSDGSFFLYSKLTVDKSRWQQGNVFSCSVMHEALHNHYTQKSLSLSPGK

SEQ ID NO: 28 - protein, 449 aa, Artificial Sequence
  SEQ ID NO: 28 - OKT3 humanized heavy chain with VH1 domain
EVQLVESGGGLVQPGGSLRLSCAASGYTFTRYTIHWVRQAPGKGLEWVGYINPSRGYTRYADSVKGRFTISADTSKNTAYLQMNSLRAEDTAVYYCARYYDDHYCLDYWGQGTLVTVSSASTKGPSVFPLAPSSKSTSGGTAALGCLVKDYFPEPVTVSWNSGALTSGVHTFPAVLQSSGLYSLSSVVTVPSSSLGTQTYICNVNHKPSNTKVDKKVEPKSCDKTHTCPPCPAPELLGGPSVFLFPPKPKDTLMISRTPEVTCVVVDVSHEDPEVKFNWYVDGVEVHNAKTKPREEQYNSTYRVVSVLTVLHQDWLNGKEYKCKVSNKALPAPIEKTISKAKGQPREPQVYTLPPSRDELTKNQVSLTCLVKGFYPSDIAVEWESNGQPENNYKTTPPVLDSDGSFFLYSKLTVDKSRWQQGNVFSCSVMHEALHNHYTQKSLSLSPGK

SEQ ID NO: 29 - protein, 449 aa, Artificial Sequence
  SEQ ID NO: 29 - OKT3 humanized heavy chain with VH2 domain
EVQLVESGGGLVQPGGSLRLSCAASGYTFTRYTMHWVRQAPGKGLEWVGYINPSRGYTRYADSVKGRFTISADTSKNTAYLQMNSLRAEDTAVYYCARYYDDHYCLDYWGQGTLVTVSSASTKGPSVFPLAPSSKSTSGGTAALGCLVKDYFPEPVTVSWNSGALTSGVHTFPAVLQSSGLYSLSSVVTVPSSSLGTQTYICNVNHKPSNTKVDKKVEPKSCDKTHTCPPCPAPELLGGPSVFLFPPKPKDTLMISRTPEVTCVVVDVSHEDPEVKFNWYVDGVEVHNAKTKPREEQYNSTYRVVSVLTVLHQDWLNGKEYKCKVSNKALPAPIEKTISKAKGQPREPQVYTLPPSRDELTKNQVSLTCLVKGFYPSDIAVEWESNGQPENNYKTTPPVLDSDGSFFLYSKLTVDKSRWQQGNVFSCSVMHEALHNHYTQKSLSLSPGK

SEQ ID NO: 30 - protein, 449 aa, Artificial Sequence
  SEQ ID NO: 30 - OKT3 humanized heavy chain with VH3 domain
EVQLVESGGGLVQPGGSLRLSCAASGYTFTRYTIHWVRQAPGKGLEWVGYINPSRGYTRYADSVKGRFTISTDTSKNTAYLQMNSLRAEDTAVYYCARYYDDHYCLDYWGQGTLVTVSSASTKGPSVFPLAPSSKSTSGGTAALGCLVKDYFPEPVTVSWNSGALTSGVHTFPAVLQSSGLYSLSSVVTVPSSSLGTQTYICNVNHKPSNTKVDKKVEPKSCDKTHTCPPCPAPELLGGPSVFLFPPKPKDTLMISRTPEVTCVVVDVSHEDPEVKFNWYVDGVEVHNAKTKPREEQYNSTYRVVSVLTVLHQDWLNGKEYKCKVSNKALPAPIEKTISKAKGQPREPQVYTLPPSRDELTKNQVSLTCLVKGFYPSDIAVEWESNGQPENNYKTTPPVLDSDGSFFLYSKLTVDKSRWQQGNVFSCSVMHEALHNHYTQKSLSLSPGK

SEQ ID NO: 31 - protein, 449 aa, Artificial Sequence
  SEQ ID NO: 31 - OKT3 humanized heavy chain with VH4 domain
EVQLVESGGGLVQPGGSLRLSCAASGYTFTRYTMHWVRQAPGKGLEWVGYINPSRGYTRYADSVKGRFTISTDTSKNTAYLQMNSLRAEDTAVYYCARYYDDHYCLDYWGQGTLVTVSSASTKGPSVFPLAPSSKSTSGGTAALGCLVKDYFPEPVTVSWNSGALTSGVHTFPAVLQSSGLYSLSSVVTVPSSSLGTQTYICNVNHKPSNTKVDKKVEPKSCDKTHTCPPCPAPELLGGPSVFLFPPKPKDTLMISRTPEVTCVVVDVSHEDPEVKFNWYVDGVEVHNAKTKPREEQYNSTYRVVSVLTVLHQDWLNGKEYKCKVSNKALPAPIEKTISKAKGQPREPQVYTLPPSRDELTKNQVSLTCLVKGFYPSDIAVEWESNGQPENNYKTTPPVLDSDGSFFLYSKLTVDKSRWQQGNVFSCSVMHEALHNHYTQKSLSLSPGK

SEQ ID NO: 32 - protein, 449 aa, Artificial Sequence
  SEQ ID NO: 32 - OKT3 humanized heavy chain with VH5 domain
EVQLVESGGGLVQPGGSLRLSCAASGYTFTRYTMHWVRQAPGKGLEWVGYINPSRGYTRYADSVKGRFTLSTDKSKNTAYLQMNSLRAEDTAVYYCARYYDDHYCLDYWGQGTLVTVSSASTKGPSVFPLAPSSKSTSGGTAALGCLVKDYFPEPVTVSWNSGALTSGVHTFPAVLQSSGLYSLSSVVTVPSSSLGTQTYICNVNHKPSNTKVDKKVEPKSCDKTHTCPPCPAPELLGGPSVFLFPPKPKDTLMISRTPEVTCVVVDVSHEDPEVKFNWYVDGVEVHNAKTKPREEQYNSTYRVVSVLTVLHQDWLNGKEYKCKVSNKALPAPIEKTISKAKGQPREPQVYTLPPSRDELTKNQVSLTCLVKGFYPSDIAVEWESNGQPENNYKTTPPVLDSDGSFFLYSKLTVDKSRWQQGNVFSCSVMHEALHNHYTQKSLSLSPGK

SEQ ID NO: 33 - protein, 449 aa, Artificial Sequence
  SEQ ID NO: 33 - OKT3 humanized heavy chain with VH6 domain
EVQLVESGGGLVQPGGSLRLSCAASGYTFTRYTMHWVRQAPGKGLEWIGYINPSRGYTRYADSVKGRFTLSTDKSKNTAYLQMNSLRAEDTAVYYCARYYDDHYCLDYWGQGTLVTVSSASTKGPSVFPLAPSSKSTSGGTAALGCLVKDYFPEPVTVSWNSGALTSGVHTFPAVLQSSGLYSLSSVVTVPSSSLGTQTYICNVNHKPSNTKVDKKVEPKSCDKTHTCPPCPAPELLGGPSVFLFPPKPKDTLMISRTPEVTCVVVDVSHEDPEVKFNWYVDGVEVHNAKTKPREEQYNSTYRVVSVLTVLHQDWLNGKEYKCKVSNKALPAPIEKTISKAKGQPREPQVYTLPPSRDELTKNQVSLTCLVKGFYPSDIAVEWESNGQPENNYKTTPPVLDSDGSFFLYSKLTVDKSRWQQGNVFSCSVMHEALHNHYTQKSLSLSPGK

SEQ ID NO: 34 - protein, 449 aa, Artificial Sequence
  SEQ ID NO: 34 - OKT3 humanized heavy chain with VH7 domain
EVQLVESGGGLVQPGGSLRLSCAASGYTFTRYTMHWVRQAPGKGLEWVGYINPSRGYTNYADSVKGRFTLSTDKSKNTAYLQMNSLRAEDTAVYYCARYYDDHYCLDYWGQGTLVTVSSASTKGPSVFPLAPSSKSTSGGTAALGCLVKDYFPEPVTVSWNSGALTSGVHTFPAVLQSSGLYSLSSVVTVPSSSLGTQTYICNVNHKPSNTKVDKKVEPKSCDKTHTCPPCPAPELLGGPSVFLFPPKPKDTLMISRTPEVTCVVVDVSHEDPEVKFNWYVDGVEVHNAKTKPREEQYNSTYRVVSVLTVLHQDWLNGKEYKCKVSNKALPAPIEKTISKAKGQPREPQVYTLPPSRDELTKNQVSLTCLVKGFYPSDIAVEWESNGQPENNYKTTPPVLDSDGSFFLYSKLTVDKSRWQQGNVFSCSVMHEALHNHYTQKSLSLSPGK

SEQ ID NO: 35 - protein, 449 aa, Artificial Sequence
  SEQ ID NO: 35 - OKT3 humanized heavy chain with VH8 domain
EVQLVESGGGLVQPGGSLRLSCAASGYTFTRYTMHWVRQAPGKGLEWIGYINPSRGYTYYADSVKGRFTLSTDKSKNTAYLQMNSLRAEDTAVYYCARYYDDHYCLDYWGQGTLVTVSSASTKGPSVFPLAPSSKSTSGGTAALGCLVKDYFPEPVTVSWNSGALTSGVHTFPAVLQSSGLYSLSSVVTVPSSSLGTQTYICNVNHKPSNTKVDKKVEPKSCDKTHTCPPCPAPELLGGPSVFLFPPKPKDTLMISRTPEVTCVVVDVSHEDPEVKFNWYVDGVEVHNAKTKPREEQYNSTYRVVSVLTVLHQDWLNGKEYKCKVSNKALPAPIEKTISKAKGQPREPQVYTLPPSRDELTKNQVSLTCLVKGFYPSDIAVEWESNGQPENNYKTTPPVLDSDGSFFLYSKLTVDKSRWQQGNVFSCSVMHEALHNHYTQKSLSLSPGK

SEQ ID NO: 36 - protein, 449 aa, Artificial Sequence
  SEQ ID NO: 36 - OKT3 humanized heavy chain with VH9 domain
EVQLVESGGGLVQPGGSLRLSCAASGYTFTRYTMHWVRQAPGKGLEWIGYINPSRGYTYYADSVKSRFTLSTDKSKNTAYLQMNSLRAEDTAVYYCARYYDDHYCLDYWGQGTLVTVSSASTKGPSVFPLAPSSKSTSGGTAALGCLVKDYFPEPVTVSWNSGALTSGVHTFPAVLQSSGLYSLSSVVTVPSSSLGTQTYICNVNHKPSNTKVDKKVEPKSCDKTHTCPPCPAPELLGGPSVFLFPPKPKDTLMISRTPEVTCVVVDVSHEDPEVKFNWYVDGVEVHNAKTKPREEQYNSTYRVVSVLTVLHQDWLNGKEYKCKVSNKALPAPIEKTISKAKGQPREPQVYTLPPSRDELTKNQVSLTCLVKGFYPSDIAVEWESNGQPENNYKTTPPVLDSDGSFFLYSKLTVDKSRWQQGNVFSCSVMHEALHNHYTQKSLSLSPGK

SEQ ID NO: 37 - protein, 449 aa, Artificial Sequence
  SEQ ID NO: 37 - OKT3 humanized heavy chain with VH10 domain
EVQLVESGGGLVQPGGSLRLSCAASGYTFTRYTMHWVRQAPGKGLEWIGYINPSRGYTYYADSVKSRATLSTDKSKNTAYLQMNSLRAEDTAVYYCARYYDDHYCLDYWGQGTLVTVSSASTKGPSVFPLAPSSKSTSGGTAALGCLVKDYFPEPVTVSWNSGALTSGVHTFPAVLQSSGLYSLSSVVTVPSSSLGTQTYICNVNHKPSNTKVDKKVEPKSCDKTHTCPPCPAPELLGGPSVFLFPPKPKDTLMISRTPEVTCVVVDVSHEDPEVKFNWYVDGVEVHNAKTKPREEQYNSTYRVVSVLTVLHQDWLNGKEYKCKVSNKALPAPIEKTISKAKGQPREPQVYTLPPSRDELTKNQVSLTCLVKGFYPSDIAVEWESNGQPENNYKTTPPVLDSDGSFFLYSKLTVDKSRWQQGNVFSCSVMHEALHNHYTQKSLSLSPGK

SEQ ID NO: 38 - protein, 449 aa, Artificial Sequence
  SEQ ID NO: 38 - OKT3 humanized heavy chain with VH11 domain
EVQLVESGGGLVQPGGSLRLSCAASGYTFTRYTMHWVRQAPGKGLEWIGYINPSRGYTYYADSVKGRFTLSTDKSKNTAYLQMSSLRAEDTAVYYCARYYDDHYCLDYWGQGTLVTVSSASTKGPSVFPLAPSSKSTSGGTAALGCLVKDYFPEPVTVSWNSGALTSGVHTFPAVLQSSGLYSLSSVVTVPSSSLGTQTYICNVNHKPSNTKVDKKVEPKSCDKTHTCPPCPAPELLGGPSVFLFPPKPKDTLMISRTPEVTCVVVDVSHEDPEVKFNWYVDGVEVHNAKTKPREEQYNSTYRVVSVLTVLHQDWLNGKEYKCKVSNKALPAPIEKTISKAKGQPREPQVYTLPPSRDELTKNQVSLTCLVKGFYPSDIAVEWESNGQPENNYKTTPPVLDSDGSFFLYSKLTVDKSRWQQGNVFSCSVMHEALHNHYTQKSLSLSPGK

SEQ ID NO: 39 - protein, 213 aa, Artificial Sequence
  SEQ ID NO: 39 - OKT3 humanized light chain with VL domain
DIQMTQSPSSLSASVGDRVTITCRASSSVSYVAWYQQKPGKAPKLLIYDTSKLYSGVPSRFSGSRSGTDFTLTISSLQPEDFATYYCQQWSSNPPTFGQGTKVEIKRTVAAPSVFIFPPSDEQLKSGTASVVCLLNNFYPREAKVQWKVDNALQSGNSQESVTEQDSKDSTYSLSSTLTLSKADYEKHKVYACEVTHQGLSSPVTKSFNRGEC

SEQ ID NO: 40 - protein, 213 aa, Artificial Sequence
  SEQ ID NO: 40 - OKT3 humanized light chain with VL1 domain
DIQMTQSPSSLSASVGDRVTITCRASSSVSYVAWYQQKPGKAPKLLIYDTSKLYSGVPSRFSGSRSGTDYTLTISSLQPEDFATYYCQQWSSNPPTFGQGTKVEIKRTVAAPSVFIFPPSDEQLKSGTASVVCLLNNFYPREAKVQWKVDNALQSGNSQESVTEQDSKDSTYSLSSTLTLSKADYEKHKVYACEVTHQGLSSPVTKSFNRGEC

SEQ ID NO: 41 - protein, 213 aa, Artificial Sequence
  SEQ ID NO: 41 - OKT3 humanized light chain with VL2 domain
DIQLTQSPSSLSASVGDRVTITCRASSSVSYVAWYQQKPGKAPKLLIYDTSKLYSGVPSRFSGSRSGTDFTLTISSLQPEDFATYYCQQWSSNPPTFGQGTKVEIKRTVAAPSVFIFPPSDEQLKSGTASVVCLLNNFYPREAKVQWKVDNALQSGNSQESVTEQDSKDSTYSLSSTLTLSKADYEKHKVYACEVTHQGLSSPVTKSFNRGEC

SEQ ID NO: 42 - protein, 213 aa, Artificial Sequence
  SEQ ID NO: 42 - OKT3 humanized light chain with VL3 domain
DIQLTQSPSSLSASVGDRVTITCRASSSVSYVAWYQQKPGKAPKLLIYDTSKLYSGVPSRFSGSRSGTDYTLTISSLQPEDFATYYCQQWSSNPPTFGQGTKVEIKRTVAAPSVFIFPPSDEQLKSGTASVVCLLNNFYPREAKVQWKVDNALQSGNSQESVTEQDSKDSTYSLSSTLTLSKADYEKHKVYACEVTHQGLSSPVTKSFNRGEC

SEQ ID NO: 43 - protein, 213 aa, Artificial Sequence
  SEQ ID NO: 43 - OKT3 humanized light chain with VL4 domain
DIQLTQSPSSLSASVGDRVTITCRASSSVSYVAWYQQKPGKAPKRWIYDTSKLYSGVPSRFSGSRSGTDYTLTISSLQPEDFATYYCQQWSSNPPTFGQGTKVEIKRTVAAPSVFIFPPSDEQLKSGTASVVCLLNNFYPREAKVQWKVDNALQSGNSQESVTEQDSKDSTYSLSSTLTLSKADYEKHKVYACEVTHQGLSSPVTKSFNRGEC

SEQ ID NO: 44 - protein, 213 aa, Artificial Sequence
  SEQ ID NO: 44 - OKT3 humanized light chain with VL5 domain
DIQLTQSPSSLSASVGDRVTITCRASSSVSYMNWYQQKPGKAPKLLIYDTSKLYSGVPSRFSGSRSGTDYTLTISSLQPEDFATYYCQQWSSNPPTFGQGTKVEIKRTVAAPSVFIFPPSDEQLKSGTASVVCLLNNFYPREAKVQWKVDNALQSGNSQESVTEQDSKDSTYSLSSTLTLSKADYEKHKVYACEVTHQGLSSPVTKSFNRGEC

SEQ ID NO: 45 - protein, 213 aa, Artificial Sequence
  SEQ ID NO: 45 - OKT3 humanized light chain with VL6 domain
DIQLTQSPSSLSASVGDRVTITCRASSSVSYVAWYQQKPGKAPKRWIYDTSKLYSGVPSRFSGSRSGTDYTLTISSLQPEDFATYYCQQWSSNPFTFGQGTKVEIKRTVAAPSVFIFPPSDEQLKSGTASVVCLLNNFYPREAKVQWKVDNALQSGNSQESVTEQDSKDSTYSLSSTLTLSKADYEKHKVYACEVTHQGLSSPVTKSFNRGEC

SEQ ID NO: 46 - protein, 213 aa, Artificial Sequence
  SEQ ID NO: 46 - OKT3 humanized light chain with VL7 domain
DIQLTQSPSSLSASVGDRVTITCRASSSVSYMNWYQQKPGKAPKLLIYDTSKLYSGVPSRFSGSRSGTDYTLTISSLQPEDFATYYCQQWSSNPFTFGQGTKVEIKRTVAAPSVFIFPPSDEQLKSGTASVVCLLNNFYPREAKVQWKVDNALQSGNSQESVTEQDSKDSTYSLSSTLTLSKADYEKHKVYACEVTHQGLSSPVTKSFNRGEC

SEQ ID NO: 47 - protein, 213 aa, Artificial Sequence
  SEQ ID NO: 47 - OKT3 humanized light chain with VL8 domain
DIQLTQSPSSLSASVGDRVTITCRASSSVSYVAWYQQKPGKAPKRWIYDTSKLYSGVPSRFSGSGSGTDYTLTISSLQPEDFATYYCQQWSSNPPTFGQGTKVEIKRTVAAPSVFIFPPSDEQLKSGTASVVCLLNNFYPREAKVQWKVDNALQSGNSQESVTEQDSKDSTYSLSSTLTLSKADYEKHKVYACEVTHQGLSSPVTKSFNRGEC

SEQ ID NO: 48 - protein, 119 aa, Artificial Sequence
  SEQ ID NO: 48 - OKT3 humanized VH8 domain
EVQLVESGGGLVQPGGSLRLSCAASGYTFTRYTMHWVRQAPGKGLEWIGYINPSRGYTYYADSVKGRFTLSTDKSKNTAYLQMNSLRAEDTAVYYCARYYDDHYCLDYWGQGTLVTVSS

SEQ ID NO: 49 - protein, 119 aa, Artificial Sequence
  SEQ ID NO: 49 - OKT3 humanized VH11 domain
EVQLVESGGGLVQPGGSLRLSCAASGYTFTRYTMHWVRQAPGKGLEWIGYINPSRGYTYYADSVKGRFTLSTDKSKNTAYLQMSSLRAEDTAVYYCARYYDDHYCLDYWGQGTLVTVSS

SEQ ID NO: 50 - protein, 106 aa, Artificial Sequence
  SEQ ID NO: 50 - OKT3 humanized VL4 domain
DIQLTQSPSSLSASVGDRVTITCRASSSVSYVAWYQQKPGKAPKRWIYDTSKLYSGVPSRFSGSRSGTDYTLTISSLQPEDFATYYCQQWSSNPPTFGQGTKVEIK

SEQ ID NO: 51 - protein, 106 aa, Artificial Sequence
  SEQ ID NO: 51 - OKT3 humanized VL8 domain
DIQLTQSPSSLSASVGDRVTITCRASSSVSYVAWYQQKPGKAPKRWIYDTSKLYSGVPSRFSGSGSGTDYTLTISSLQPEDFATYYCQQWSSNPPTFGQGTKVEIK

SEQ ID NO: 52 - protein, 472 aa, Artificial Sequence
  SEQ ID NO: 52 - scFv fragment  mouse OKT3 - human IgG1 Fc fusion
QVQLQQSGAELARPGASVKMSCKASGYTFTRYTMHWVKQRPGQGLEWIGYINPSRGYTNYNQKFKDKATLTTDKSSSTAYMQLSSLTSEDSAVYYCARYYDDHYCLDYWGQGTTLTVSSGGGGSGGGGSGGGGSQIVLTQSPAIMSASPGEKVTMTCSASSSVSYMNWYQQKSGTSPKRWIYDTSKLASGVPAHFRGSGSGTSYSLTISGMEAEDAATYYCQQWSSNPFTFGSGTKLEINGGGGTDKTHTCPPCPAPELLGGPSVFLFPPKPKDTLMISRTPEVTCVVVDVSHEDPEVKFNWYVDGVEVHNAKTKPREEQYNSTYRVVSVLTVLHQDWLNGKEYKCKVSNKALPAPIEKTISKAKGQPREPQVYTLPPSRDELTKNQVSLTCLVKGFYPSDIAVEWESNGQPENNYKTTPPVLDSDGSFFLYSKLTVDKSRWQQGNVFSCSVMHEALHNHYTQKSLSLSPGK

SEQ ID NO: 53 - protein, 477 aa, Artificial Sequence
  SEQ ID NO: 53 - scFv fragment  humanized OKT3 VH5-VL3 - human IgG1 Fc fusion
EVQLVESGGGLVQPGGSLRLSCAASGYTFTRYTMHWVRQAPGKGLEWVGYINPSRGYTRYADSVKGRFTLSTDKSKNTAYLQMNSLRAEDTAVYYCARYYDDHYCLDYWGQGTLVTVSSGGGGSGGGGSGGGGSGGGASDIQLTQSPSSLSASVGDRVTITCRASSSVSYVAWYQQKPGKAPKLLIYDTSKLYSGVPSRFSGSRSGTDYTLTISSLQPEDFATYYCQQWSSNPPTFGQGTKVEIKGGGGTDKTHTCPPCPAPELLGGPSVFLFPPKPKDTLMISRTPEVTCVVVDVSHEDPEVKFNWYVDGVEVHNAKTKPREEQYNSTYRVVSVLTVLHQDWLNGKEYKCKVSNKALPAPIEKTISKAKGQPREPQVYTLPPSRDELTKNQVSLTCLVKGFYPSDIAVEWESNGQPENNYKTTPPVLDSDGSFFLYSKLTVDKSRWQQGNVFSCSVMHEALHNHYTQKSLSLSPGK

SEQ ID NO: 54 - protein, 477 aa, Artificial Sequence
  SEQ ID NO: 54 - scFv fragment  humanized OKT3 VH6-VL4 - human IgG1 Fc fusion
EVQLVESGGGLVQPGGSLRLSCAASGYTFTRYTMHWVRQAPGKGLEWIGYINPSRGYTRYADSVKGRFTLSTDKSKNTAYLQMNSLRAEDTAVYYCARYYDDHYCLDYWGQGTLVTVSSGGGGSGGGGSGGGGSGGGASDIQLTQSPSSLSASVGDRVTITCRASSSVSYVAWYQQKPGKAPKRWIYDTSKLYSGVPSRFSGSRSGTDYTLTISSLQPEDFATYYCQQWSSNPPTFGQGTKVEIKGGGGTDKTHTCPPCPAPELLGGPSVFLFPPKPKDTLMISRTPEVTCVVVDVSHEDPEVKFNWYVDGVEVHNAKTKPREEQYNSTYRVVSVLTVLHQDWLNGKEYKCKVSNKALPAPIEKTISKAKGQPREPQVYTLPPSRDELTKNQVSLTCLVKGFYPSDIAVEWESNGQPENNYKTTPPVLDSDGSFFLYSKLTVDKSRWQQGNVFSCSVMHEALHNHYTQKSLSLSPGK

SEQ ID NO: 55 - protein, 477 aa, Artificial Sequence
  SEQ ID NO: 55 - scFv fragment  humanized OKT3 VH6-VL5 - human IgG1 Fc fusion
EVQLVESGGGLVQPGGSLRLSCAASGYTFTRYTMHWVRQAPGKGLEWIGYINPSRGYTRYADSVKGRFTLSTDKSKNTAYLQMNSLRAEDTAVYYCARYYDDHYCLDYWGQGTLVTVSSGGGGSGGGGSGGGGSGGGASDIQLTQSPSSLSASVGDRVTITCRASSSVSYMNWYQQKPGKAPKLLIYDTSKLYSGVPSRFSGSRSGTDYTLTISSLQPEDFATYYCQQWSSNPPTFGQGTKVEIKGGGGTDKTHTCPPCPAPELLGGPSVFLFPPKPKDTLMISRTPEVTCVVVDVSHEDPEVKFNWYVDGVEVHNAKTKPREEQYNSTYRVVSVLTVLHQDWLNGKEYKCKVSNKALPAPIEKTISKAKGQPREPQVYTLPPSRDELTKNQVSLTCLVKGFYPSDIAVEWESNGQPENNYKTTPPVLDSDGSFFLYSKLTVDKSRWQQGNVFSCSVMHEALHNHYTQKSLSLSPGK

SEQ ID NO: 56 - protein, 477 aa, Artificial Sequence
  SEQ ID NO: 56 - scFv fragment  humanized OKT3 VH8-VL4 - human IgG1 Fc fusion
EVQLVESGGGLVQPGGSLRLSCAASGYTFTRYTMHWVRQAPGKGLEWIGYINPSRGYTYYADSVKGRFTLSTDKSKNTAYLQMNSLRAEDTAVYYCARYYDDHYCLDYWGQGTLVTVSSGGGGSGGGGSGGGGSGGGASDIQLTQSPSSLSASVGDRVTITCRASSSVSYVAWYQQKPGKAPKRWIYDTSKLYSGVPSRFSGSRSGTDYTLTISSLQPEDFATYYCQQWSSNPPTFGQGTKVEIKGGGGTDKTHTCPPCPAPELLGGPSVFLFPPKPKDTLMISRTPEVTCVVVDVSHEDPEVKFNWYVDGVEVHNAKTKPREEQYNSTYRVVSVLTVLHQDWLNGKEYKCKVSNKALPAPIEKTISKAKGQPREPQVYTLPPSRDELTKNQVSLTCLVKGFYPSDIAVEWESNGQPENNYKTTPPVLDSDGSFFLYSKLTVDKSRWQQGNVFSCSVMHEALHNHYTQKSLSLSPGK

SEQ ID NO: 57 - protein, 477 aa, Artificial Sequence
  SEQ ID NO: 57 - scFv fragment  humanized OKT3 VH8-VL8 - human IgG1 Fc fusion
EVQLVESGGGLVQPGGSLRLSCAASGYTFTRYTMHWVRQAPGKGLEWIGYINPSRGYTYYADSVKGRFTLSTDKSKNTAYLQMNSLRAEDTAVYYCARYYDDHYCLDYWGQGTLVTVSSGGGGSGGGGSGGGGSGGGASDIQLTQSPSSLSASVGDRVTITCRASSSVSYVAWYQQKPGKAPKRWIYDTSKLYSGVPSRFSGSGSGTDYTLTISSLQPEDFATYYCQQWSSNPPTFGQGTKVEIKGGGGTDKTHTCPPCPAPELLGGPSVFLFPPKPKDTLMISRTPEVTCVVVDVSHEDPEVKFNWYVDGVEVHNAKTKPREEQYNSTYRVVSVLTVLHQDWLNGKEYKCKVSNKALPAPIEKTISKAKGQPREPQVYTLPPSRDELTKNQVSLTCLVKGFYPSDIAVEWESNGQPENNYKTTPPVLDSDGSFFLYSKLTVDKSRWQQGNVFSCSVMHEALHNHYTQKSLSLSPGK

SEQ ID NO: 58 - protein, 245 aa, Artificial Sequence
  SEQ ID NO: 58 - scFv fragment  humanized OKT3 VH8-VL4
EVQLVESGGGLVQPGGSLRLSCAASGYTFTRYTMHWVRQAPGKGLEWIGYINPSRGYTYYADSVKGRFTLSTDKSKNTAYLQMNSLRAEDTAVYYCARYYDDHYCLDYWGQGTLVTVSSGGGGSGGGGSGGGGSGGGASDIQLTQSPSSLSASVGDRVTITCRASSSVSYVAWYQQKPGKAPKRWIYDTSKLYSGVPSRFSGSRSGTDYTLTISSLQPEDFATYYCQQWSSNPPTFGQGTKVEIK

SEQ ID NO: 59 - protein, 245 aa, Artificial Sequence
  SEQ ID NO: 59 - scFv fragment  humanized OKT3 VH8-VL8
EVQLVESGGGLVQPGGSLRLSCAASGYTFTRYTMHWVRQAPGKGLEWIGYINPSRGYTYYADSVKGRFTLSTDKSKNTAYLQMNSLRAEDTAVYYCARYYDDHYCLDYWGQGTLVTVSSGGGGSGGGGSGGGGSGGGASDIQLTQSPSSLSASVGDRVTITCRASSSVSYVAWYQQKPGKAPKRWIYDTSKLYSGVPSRFSGSGSGTDYTLTISSLQPEDFATYYCQQWSSNPPTFGQGTKVEIK

SEQ ID NO: 60 - protein, 125 aa, Artificial Sequence
  SEQ ID NO: 60 - Mouse anti-human CD3 epsilon SP34 VH domain
EVQLVESGGGLVQPKGSLKLSCAASGFTFNTYAMNWVRQAPGKGLEWVARIRSKYNNYATYYADSVKDRFTISRDDSQSILYLQMNNLKTEDTAMYYCVRHGNFGNSYVSWFAYWGQGTLVTVSA

SEQ ID NO: 61 - protein, 109 aa, Artificial Sequence
  SEQ ID NO: 61 - Mouse anti-human CD3 epsilon SP34 VL domain
QAVVTQESALTTSPGETVTLTCRSSTGAVTTSNYANWVQEKPDHLFTGLIGGTNKRAPGVPARFSGSLIGDKAALTITGAQTEDEAIYFCALWYSNLWVFGGGTKLTVL

SEQ ID NO: 62 - protein, 455 aa, Artificial Sequence
  SEQ ID NO: 62 - Chimeric SP34 heavy chain IgG1
EVQLVESGGGLVQPKGSLKLSCAASGFTFNTYAMNWVRQAPGKGLEWVARIRSKYNNYATYYADSVKDRFTISRDDSQSILYLQMNNLKTEDTAMYYCVRHGNFGNSYVSWFAYWGQGTLVTVSAASTKGPSVFPLAPSSKSTSGGTAALGCLVKDYFPEPVTVSWNSGALTSGVHTFPAVLQSSGLYSLSSVVTVPSSSLGTQTYICNVNHKPSNTKVDKKVEPKSCDKTHTCPPCPAPELLGGPSVFLFPPKPKDTLMISRTPEVTCVVVDVSHEDPEVKFNWYVDGVEVHNAKTKPREEQYNSTYRVVSVLTVLHQDWLNGKEYKCKVSNKALPAPIEKTISKAKGQPREPQVYTLPPSRDELTKNQVSLTCLVKGFYPSDIAVEWESNGQPENNYKTTPPVLDSDGSFFLYSKLTVDKSRWQQGNVFSCSVMHEALHNHYTQKSLSLSPGK

SEQ ID NO: 63 - protein, 216 aa, Artificial Sequence
  SEQ ID NO: 63 - Chimeric SP34 light chain (mouse V lambda - human lambda constant domain)
QAVVTQESALTTSPGETVTLTCRSSTGAVTTSNYANWVQEKPDHLFTGLIGGTNKRAPGVPARFSGSLIGDKAALTITGAQTEDEAIYFCALWYSNLWVFGGGTKLTVLRTVAAPSVFIFPPSDEQLKSGTASVVCLLNNFYPREAKVQWKVDNALQSGNSQESVTEQDSKDSTYSLSSTLTLSKADYEKHKVYACEVTHQGLSSPVTKSFNRGEC

SEQ ID NO: 64 - protein, 455 aa, Artificial Sequence
  SEQ ID NO: 64 - SP34 humanized heavy chain with VH1 domain
EVQLVESGGGLVQPGGSLRLSCAASGFTFNTYAMNWVRQAPGKGLEWVARIRSKYNNYATYYADSVKGRFTISRDDSKNTLYLQMNSLRAEDTAVYYCVRHGNFGNSYVSWFAYWGQGTTVTVSSASTKGPSVFPLAPSSKSTSGGTAALGCLVKDYFPEPVTVSWNSGALTSGVHTFPAVLQSSGLYSLSSVVTVPSSSLGTQTYICNVNHKPSNTKVDKKVEPKSCDKTHTCPPCPAPELLGGPSVFLFPPKPKDTLMISRTPEVTCVVVDVSHEDPEVKFNWYVDGVEVHNAKTKPREEQYNSTYRVVSVLTVLHQDWLNGKEYKCKVSNKALPAPIEKTISKAKGQPREPQVYTLPPSRDELTKNQVSLTCLVKGFYPSDIAVEWESNGQPENNYKTTPPVLDSDGSFFLYSKLTVDKSRWQQGNVFSCSVMHEALHNHYTQKSLSLSPGK

SEQ ID NO: 65 - protein, 455 aa, Artificial Sequence
  SEQ ID NO: 65 - SP34 humanized heavy chain with VH2 domain
EVQLVESGGGLVQPGGSLRLSCAASGFTFNTYAMNWVRQAPGKGLEWVARIRSKYNNYATYYADSVKSRFTISRDDSKNTLYLQMNSLRAEDTAVYYCVRHGNFGNSYVSWFAYWGQGTTVTVSSASTKGPSVFPLAPSSKSTSGGTAALGCLVKDYFPEPVTVSWNSGALTSGVHTFPAVLQSSGLYSLSSVVTVPSSSLGTQTYICNVNHKPSNTKVDKKVEPKSCDKTHTCPPCPAPELLGGPSVFLFPPKPKDTLMISRTPEVTCVVVDVSHEDPEVKFNWYVDGVEVHNAKTKPREEQYNSTYRVVSVLTVLHQDWLNGKEYKCKVSNKALPAPIEKTISKAKGQPREPQVYTLPPSRDELTKNQVSLTCLVKGFYPSDIAVEWESNGQPENNYKTTPPVLDSDGSFFLYSKLTVDKSRWQQGNVFSCSVMHEALHNHYTQKSLSLSPGK

SEQ ID NO: 66 - protein, 455 aa, Artificial Sequence
  SEQ ID NO: 66 - SP34 humanized heavy chain with VH3 domain
EVQLVESGGGLVQPGGSLRLSCAASGFTFNTYAMNWVRQAPGKGLEWVARIRSKYNNYATYYADSVKSRFTISRDDSKNTLYLQMNSLRAEDTAVYYCVRHGNFGNSYVSYFAYWGQGTTVTVSSASTKGPSVFPLAPSSKSTSGGTAALGCLVKDYFPEPVTVSWNSGALTSGVHTFPAVLQSSGLYSLSSVVTVPSSSLGTQTYICNVNHKPSNTKVDKKVEPKSCDKTHTCPPCPAPELLGGPSVFLFPPKPKDTLMISRTPEVTCVVVDVSHEDPEVKFNWYVDGVEVHNAKTKPREEQYNSTYRVVSVLTVLHQDWLNGKEYKCKVSNKALPAPIEKTISKAKGQPREPQVYTLPPSRDELTKNQVSLTCLVKGFYPSDIAVEWESNGQPENNYKTTPPVLDSDGSFFLYSKLTVDKSRWQQGNVFSCSVMHEALHNHYTQKSLSLSPGK

SEQ ID NO: 67 - protein, 455 aa, Artificial Sequence
  SEQ ID NO: 67 - SP34 humanized heavy chain with VH4 domain
EVQLVESGGGLVQPGGSLRLSCAASGFTFNTYAMNWVRQAPGKGLEWVARIRSKYNNYATYYADSVKSRFTISRDDSKNTLYLQMNSLRAEDTAVYYCVRHGNFGNSYVSFFAYWGQGTTVTVSSASTKGPSVFPLAPSSKSTSGGTAALGCLVKDYFPEPVTVSWNSGALTSGVHTFPAVLQSSGLYSLSSVVTVPSSSLGTQTYICNVNHKPSNTKVDKKVEPKSCDKTHTCPPCPAPELLGGPSVFLFPPKPKDTLMISRTPEVTCVVVDVSHEDPEVKFNWYVDGVEVHNAKTKPREEQYNSTYRVVSVLTVLHQDWLNGKEYKCKVSNKALPAPIEKTISKAKGQPREPQVYTLPPSRDELTKNQVSLTCLVKGFYPSDIAVEWESNGQPENNYKTTPPVLDSDGSFFLYSKLTVDKSRWQQGNVFSCSVMHEALHNHYTQKSLSLSPGK

SEQ ID NO: 68 - protein, 455 aa, Artificial Sequence
  SEQ ID NO: 68 - SP34 humanized heavy chain with VH5 domain
EVQLVESGGGLVQPGGSLRLSCAASGFTFNTYAMNWVRQAPGKGLEWVARIRSKYNNYATYYADSVKGRFTISRDDSKNTLYLQMNSLRAEDTAVYYCVRHGNFGNSYVSYFAYWGQGTTVTVSSASTKGPSVFPLAPSSKSTSGGTAALGCLVKDYFPEPVTVSWNSGALTSGVHTFPAVLQSSGLYSLSSVVTVPSSSLGTQTYICNVNHKPSNTKVDKKVEPKSCDKTHTCPPCPAPELLGGPSVFLFPPKPKDTLMISRTPEVTCVVVDVSHEDPEVKFNWYVDGVEVHNAKTKPREEQYNSTYRVVSVLTVLHQDWLNGKEYKCKVSNKALPAPIEKTISKAKGQPREPQVYTLPPSRDELTKNQVSLTCLVKGFYPSDIAVEWESNGQPENNYKTTPPVLDSDGSFFLYSKLTVDKSRWQQGNVFSCSVMHEALHNHYTQKSLSLSPGK

SEQ ID NO: 69 - protein, 217 aa, Artificial Sequence
  SEQ ID NO: 69 - SP34 humanized light chain with VL1 domain
EAVVTQSPATLSVSPGERATLSCRSSTGAVTTSNYANWVQEKPGQAFRGLIGGANKRAPGVPARFSGSLSGDEATLTISSLQSEDFAVYFCQLWYSNLWVFGQGTKLEIKRTVAAPSVFIFPPSDEQLKSGTASVVCLLNNFYPREAKVQWKVDNALQSGNSQESVTEQDSKDSTYSLSSTLTLSKADYEKHKVYACEVTHQGLSSPVTKSFNRGEC

SEQ ID NO: 70 - protein, 217 aa, Artificial Sequence
  SEQ ID NO: 70 - SP34 humanized light chain with VL2 domain
EAVVTQSPATLSVSPGERATLSCRSSTGAVTTSNYANWVQEKPGQAFRGLIGGANKRAPGVPARFSGSLSGDEATLTISSLQSEDFAVYFCALWYSNLWVFGQGTKLEIKRTVAAPSVFIFPPSDEQLKSGTASVVCLLNNFYPREAKVQWKVDNALQSGNSQESVTEQDSKDSTYSLSSTLTLSKADYEKHKVYACEVTHQGLSSPVTKSFNRGEC

SEQ ID NO: 71 - protein, 216 aa, Artificial Sequence
  SEQ ID NO: 71 - SP34 humanized light chain with VL3 domain
EAVVTQSATLSVSPGERATLSCRSSTGAVTTSNYANWVQEKPGQAFRGLIGGANKRAPGVPARFSGSLSGDEATLTISSLQSEDFAVYFCQLWYSNLWVFGQGTKLEIKRTVAAPSVFIFPPSDEQLKSGTASVVCLLNNFYPREAKVQWKVDNALQSGNSQESVTEQDSKDSTYSLSSTLTLSKADYEKHKVYACEVTHQGLSSPVTKSFNRGEC

SEQ ID NO: 72 - protein, 216 aa, Artificial Sequence
  SEQ ID NO: 72 - SP34 humanized light chain with VL4 domain
EAVVTQSATLSVSPGERATLSCRSSTGAVTTSNYANWVQEKPGQAFRGLIGGANKRAPGVPARFSGSLSGDEATLTISSLQSEDFAVYFCALWYSNLWVFGQGTKLEIKRTVAAPSVFIFPPSDEQLKSGTASVVCLLNNFYPREAKVQWKVDNALQSGNSQESVTEQDSKDSTYSLSSTLTLSKADYEKHKVYACEVTHQGLSSPVTKSFNRGEC

SEQ ID NO: 73 - protein, 217 aa, Artificial Sequence
  SEQ ID NO: 73 - SP34 humanized light chain with VL5 domain
EIVVTQSPATLSVSPGERATLSCRSSTGAVTTSNYANWVQEKPGQAFRGLIGGANKRAPGVPARFSGSLSGDEATLTISSLQSEDFAVYFCALWYSNLWVFGQGTKLEIKRTVAAPSVFIFPPSDEQLKSGTASVVCLLNNFYPREAKVQWKVDNALQSGNSQESVTEQDSKDSTYSLSSTLTLSKADYEKHKVYACEVTHQGLSSPVTKSFNRGEC

SEQ ID NO: 74 - protein, 217 aa, Artificial Sequence
  SEQ ID NO: 74 - SP34 humanized light chain with VL6 domain
EAVVTQSPATLSVSPGERATLSCRSSTGAVTTSNYANWVQEKPGQAPRGLIGGANKRAPGVPARFSGSLSGDEATLTISSLQSEDFAVYFCALWYSNLWVFGQGTKLEIKRTVAAPSVFIFPPSDEQLKSGTASVVCLLNNFYPREAKVQWKVDNALQSGNSQESVTEQDSKDSTYSLSSTLTLSKADYEKHKVYACEVTHQGLSSPVTKSFNRGEC

SEQ ID NO: 75 - protein, 217 aa, Artificial Sequence
  SEQ ID NO: 75 - SP34 humanized light chain with VL7 domain
EIVVTQSPATLSVSPGERATLSCRSSTGAVTTSNYANWVQEKPGQAPRGLIGGANKRAPGVPARFSGSLSGDEATLTISSLQSEDFAVYFCALWYSNLWVFGQGTKLEIKRTVAAPSVFIFPPSDEQLKSGTASVVCLLNNFYPREAKVQWKVDNALQSGNSQESVTEQDSKDSTYSLSSTLTLSKADYEKHKVYACEVTHQGLSSPVTKSFNRGEC

SEQ ID NO: 76 - protein, 217 aa, Artificial Sequence
  SEQ ID NO: 76 - SP34 humanized light chain with VL8 domain
EAVVTQSPATLSVSPGERATLSCRSSTGAVTTSNYANWVQEKPGQAFRGLIGGANKRAPGVPARFSGSGSGDEATLTISSLQSEDFAVYFCALWYSNLWVFGQGTKLEIKRTVAAPSVFIFPPSDEQLKSGTASVVCLLNNFYPREAKVQWKVDNALQSGNSQESVTEQDSKDSTYSLSSTLTLSKADYEKHKVYACEVTHQGLSSPVTKSFNRGEC

SEQ ID NO: 77 - protein, 217 aa, Artificial Sequence
  SEQ ID NO: 77 - SP34 humanized light chain with VL9 domain
EIVVTQSPATLSVSPGERATLSCRSSTGAVTTSNYANWVQEKPGQAFRGLIGGANKRAPGVPARFSGSGSGDEATLTISSLQSEDFAVYFCALWYSNLWVFGQGTKLEIKRTVAAPSVFIFPPSDEQLKSGTASVVCLLNNFYPREAKVQWKVDNALQSGNSQESVTEQDSKDSTYSLSSTLTLSKADYEKHKVYACEVTHQGLSSPVTKSFNRGEC

SEQ ID NO: 78 - protein, 217 aa, Artificial Sequence
  SEQ ID NO: 78 - SP34 humanized light chain with VL10 domain
EAVVTQSPATLSVSPGERATLSCRSSTGAVTTSNYANWVQEKPGQAFRGLIGGANKRAPGVPARFSGSLSGDEATLTISSLQSEDFAVYYCALWYSNLWVFGQGTKLEIKRTVAAPSVFIFPPSDEQLKSGTASVVCLLNNFYPREAKVQWKVDNALQSGNSQESVTEQDSKDSTYSLSSTLTLSKADYEKHKVYACEVTHQGLSSPVTKSFNRGEC

SEQ ID NO: 79 - protein, 217 aa, Artificial Sequence
  SEQ ID NO: 79 - SP34 humanized light chain with VL11 domain
EAVVTQSPATLSVSPGERATLSCRSSTGAVTTSNYANWVQEKPGQAFRGLIGGANKRAPGVPARFSGSGSGTEATLTISSLQSEDFAVYFCALWYSNLWVFGQGTKLEIKRTVAAPSVFIFPPSDEQLKSGTASVVCLLNNFYPREAKVQWKVDNALQSGNSQESVTEQDSKDSTYSLSSTLTLSKADYEKHKVYACEVTHQGLSSPVTKSFNRGEC

SEQ ID NO: 80 - protein, 217 aa, Artificial Sequence
  SEQ ID NO: 80 - SP34 humanized light chain with VL12 domain
EAVVTQSPATLSVSPGERATLSCRSSTGAVTTSNYANWVQEKPGQAFRGLIGGANKRAPGVPARFSGSLSGTEATLTISSLQSEDFAVYFCALWYSNLWVFGQGTKLEIKRTVAAPSVFIFPPSDEQLKSGTASVVCLLNNFYPREAKVQWKVDNALQSGNSQESVTEQDSKDSTYSLSSTLTLSKADYEKHKVYACEVTHQGLSSPVTKSFNRGEC

SEQ ID NO: 81 - protein, 217 aa, Artificial Sequence
  SEQ ID NO: 81 - SP34 humanized light chain with VL13 domain
EAVVTQSPATLSVSPGERATLSCRASTGAVTTSNYANWVQEKPGQAFRGLIGGANKRAPGVPARFSGSLSGDEATLTISSLQSEDFAVYFCALWYSNLWVFGQGTKLEIKRTVAAPSVFIFPPSDEQLKSGTASVVCLLNNFYPREAKVQWKVDNALQSGNSQESVTEQDSKDSTYSLSSTLTLSKADYEKHKVYACEVTHQGLSSPVTKSFNRGEC

SEQ ID NO: 82 - protein, 217 aa, Artificial Sequence
  SEQ ID NO: 82 - SP34 humanized light chain with VL14 domain
EAVVTQSPATLSVSPGERATLSCRSSTGAVTTSNYANWVQEKPGQAFRLLIGGANKRAPGVPARFSGSLSGDEATLTISSLQSEDFAVYFCALWYSNLWVFGQGTKLEIKRTVAAPSVFIFPPSDEQLKSGTASVVCLLNNFYPREAKVQWKVDNALQSGNSQESVTEQDSKDSTYSLSSTLTLSKADYEKHKVYACEVTHQGLSSPVTKSFNRGEC

SEQ ID NO: 83 - protein, 217 aa, Artificial Sequence
  SEQ ID NO: 83 - SP34 humanized light chain with VL15 domain
EAVVTQSPATLSVSPGERATLSCRSSTGAVTTSNYANWVQQKPGQAFRGLIGGANKRAPGVPARFSGSLSGDEATLTISSLQSEDFAVYFCALWYSNLWVFGQGTKLEIKRTVAAPSVFIFPPSDEQLKSGTASVVCLLNNFYPREAKVQWKVDNALQSGNSQESVTEQDSKDSTYSLSSTLTLSKADYEKHKVYACEVTHQGLSSPVTKSFNRGEC

SEQ ID NO: 84 - protein, 217 aa, Artificial Sequence
  SEQ ID NO: 84 - SP34 humanized light chain with VL16 domain
EIVVTQSPATLSVSPGERATLSCRSSTGAVTTSNYANWVQEKPGQAFRGLIGGANKRAPGVPARFSGSLSGTEATLTISSLQSEDFAVYFCALWYSNLWVFGQGTKLEIKRTVAAPSVFIFPPSDEQLKSGTASVVCLLNNFYPREAKVQWKVDNALQSGNSQESVTEQDSKDSTYSLSSTLTLSKADYEKHKVYACEVTHQGLSSPVTKSFNRGEC

SEQ ID NO: 85 - protein, 217 aa, Artificial Sequence
  SEQ ID NO: 85 - SP34 humanized light chain with VL17 domain
EIVVTQSPATLSVSPGERATLSCRASTGAVTTSNYANWVQEKPGQAFRGLIGGANKRAPGVPARFSGSLSGDEATLTISSLQSEDFAVYFCALWYSNLWVFGQGTKLEIKRTVAAPSVFIFPPSDEQLKSGTASVVCLLNNFYPREAKVQWKVDNALQSGNSQESVTEQDSKDSTYSLSSTLTLSKADYEKHKVYACEVTHQGLSSPVTKSFNRGEC

SEQ ID NO: 86 - protein, 217 aa, Artificial Sequence
  SEQ ID NO: 86 - SP34 humanized light chain with VL18 domain
EIVVTQSPATLSVSPGERATLSCRSSTGAVTTSNYANWVQEKPGQAFRGLIGGANKRAPGVPARFSGSLSGDEATLTISSLQSEDFAVYFCALWYSNLWVFGGGTKLEIKRTVAAPSVFIFPPSDEQLKSGTASVVCLLNNFYPREAKVQWKVDNALQSGNSQESVTEQDSKDSTYSLSSTLTLSKADYEKHKVYACEVTHQGLSSPVTKSFNRGEC

SEQ ID NO: 87 - protein, 217 aa, Artificial Sequence
  SEQ ID NO: 87 - SP34 humanized light chain with VL19 domain
EIVVTQSPATLSVSPGERATLSCRSSTGAVTTSNYANWVQEKPGQAFRGLIGGANKRAPGVPARFSGSLSGTEATLTISSLQSEDFAVYYCALWYSNLWVFGQGTKLEIKRTVAAPSVFIFPPSDEQLKSGTASVVCLLNNFYPREAKVQWKVDNALQSGNSQESVTEQDSKDSTYSLSSTLTLSKADYEKHKVYACEVTHQGLSSPVTKSFNRGEC

SEQ ID NO: 88 - protein, 217 aa, Artificial Sequence
  SEQ ID NO: 88 - SP34 humanized light chain with VL20 domain
EIVVTQSPATLSVSPGERATLSCRSSTGAVTTSNYANWVQQKPGQAFRGLIGGANKRAPGVPARFSGSLSGTEATLTISSLQSEDFAVYYCALWYSNLWVFGQGTKLEIKRTVAAPSVFIFPPSDEQLKSGTASVVCLLNNFYPREAKVQWKVDNALQSGNSQESVTEQDSKDSTYSLSSTLTLSKADYEKHKVYACEVTHQGLSSPVTKSFNRGEC

SEQ ID NO: 89 - protein, 217 aa, Artificial Sequence
  SEQ ID NO: 89 - SP34 humanized light chain with VL21 domain
EIVVTQSPATLSVSPGERATLSCRSSTGAVTTSNYANWVQEKPGQAFRGLIGGANKRAPGVPARFSGSLSGDEATLTISSLQSEDFAVYYCALWYSNLWVFGQGTKLEIKRTVAAPSVFIFPPSDEQLKSGTASVVCLLNNFYPREAKVQWKVDNALQSGNSQESVTEQDSKDSTYSLSSTLTLSKADYEKHKVYACEVTHQGLSSPVTKSFNRGEC

SEQ ID NO: 90 - protein, 217 aa, Artificial Sequence
  SEQ ID NO: 90 - SP34 humanized light chain with VL22 domain
EIVVTQSPATLSVSPGERATLSCRSSTGAVTTSNYANWVQQKPGQAFRGLIGGANKRAPGVPARFSGSLSGDEATLTISSLQSEDFAVYYCALWYSNLWVFGQGTKLEIKRTVAAPSVFIFPPSDEQLKSGTASVVCLLNNFYPREAKVQWKVDNALQSGNSQESVTEQDSKDSTYSLSSTLTLSKADYEKHKVYACEVTHQGLSSPVTKSFNRGEC

SEQ ID NO: 91 - protein, 482 aa, Artificial Sequence
  SEQ ID NO: 91 - scFv fragment  humanized SP34 VH2-VL21 - human IgG1 Fc fusion
EVQLVESGGGLVQPGGSLRLSCAASGFTFNTYAMNWVRQAPGKGLEWVARIRSKYNNYATYYADSVKSRFTISRDDSKNTLYLQMNSLRAEDTAVYYCVRHGNFGNSYVSWFAYWGQGTTVTVSSGGGGSGGGGSGGGGSEIVVTQSPATLSVSPGERATLSCRSSTGAVTTSNYANWVQEKPGQAFRGLIGGANKRAPGVPARFSGSLSGDEATLTISSLQSEDFAVYYCALWYSNLWVFGQGTKLEIKGGGGTDKTHTCPPCPAPELLGGPSVFLFPPKPKDTLMISRTPEVTCVVVDVSHEDPEVKFNWYVDGVEVHNAKTKPREEQYNSTYRVVSVLTVLHQDWLNGKEYKCKVSNKALPAPIEKTISKAKGQPREPQVYTLPPSRDELTKNQVSLTCLVKGFYPSDIAVEWESNGQPENNYKTTPPVLDSDGSFFLYSKLTVDKSRWQQGNVFSCSVMHEALHNHYTQKSLSLSPGK

SEQ ID NO: 92 - protein, 482 aa, Artificial Sequence
  SEQ ID NO: 92 - scFv fragment  humanized SP34 VH3-VL23 - human IgG1 Fc fusion
EVQLVESGGGLVQPGGSLRLSCAASGFTFNTYAMNWVRQAPGKGLEWVARIRSKYNNYATYYADSVKSRFTISRDDSKNTLYLQMNSLRAEDTAVYYCVRHGNFGNSYVSYFAYWGQGTTVTVSSGGGGSGGGGSGGGGSEIVVTQSPATLSVSPGERATLSCRSSTGAVTTSNYANWVQEKPGQAFRGLIGGANKRAPGVPARFSGSLSGDEATLTISSLQSEDFAVYYCALFYSNLWVFGQGTKLEIKGGGGTDKTHTCPPCPAPELLGGPSVFLFPPKPKDTLMISRTPEVTCVVVDVSHEDPEVKFNWYVDGVEVHNAKTKPREEQYNSTYRVVSVLTVLHQDWLNGKEYKCKVSNKALPAPIEKTISKAKGQPREPQVYTLPPSRDELTKNQVSLTCLVKGFYPSDIAVEWESNGQPENNYKTTPPVLDSDGSFFLYSKLTVDKSRWQQGNVFSCSVMHEALHNHYTQKSLSLSPGK

SEQ ID NO: 93 - protein, 482 aa, Artificial Sequence
  SEQ ID NO: 93 - scFv fragment  humanized SP34 VH4-VL23 - human IgG1 Fc fusion
EVQLVESGGGLVQPGGSLRLSCAASGFTFNTYAMNWVRQAPGKGLEWVARIRSKYNNYATYYADSVKSRFTISRDDSKNTLYLQMNSLRAEDTAVYYCVRHGNFGNSYVSFFAYWGQGTTVTVSSGGGGSGGGGSGGGGSEIVVTQSPATLSVSPGERATLSCRSSTGAVTTSNYANWVQEKPGQAFRGLIGGANKRAPGVPARFSGSLSGDEATLTISSLQSEDFAVYYCALFYSNLWVFGQGTKLEIKGGGGTDKTHTCPPCPAPELLGGPSVFLFPPKPKDTLMISRTPEVTCVVVDVSHEDPEVKFNWYVDGVEVHNAKTKPREEQYNSTYRVVSVLTVLHQDWLNGKEYKCKVSNKALPAPIEKTISKAKGQPREPQVYTLPPSRDELTKNQVSLTCLVKGFYPSDIAVEWESNGQPENNYKTTPPVLDSDGSFFLYSKLTVDKSRWQQGNVFSCSVMHEALHNHYTQKSLSLSPGK

SEQ ID NO: 94 - protein, 482 aa, Artificial Sequence
  SEQ ID NO: 94 - scFv fragment  humanized SP34 VH5-VL23 - human IgG1 Fc fusion
EVQLVESGGGLVQPGGSLRLSCAASGFTFNTYAMNWVRQAPGKGLEWVARIRSKYNNYATYYADSVKGRFTISRDDSKNTLYLQMNSLRAEDTAVYYCVRHGNFGNSYVSYFAYWGQGTTVTVSSGGGGSGGGGSGGGGSEIVVTQSPATLSVSPGERATLSCRSSTGAVTTSNYANWVQEKPGQAFRGLIGGANKRAPGVPARFSGSLSGDEATLTISSLQSEDFAVYYCALFYSNLWVFGQGTKLEIKGGGGTDKTHTCPPCPAPELLGGPSVFLFPPKPKDTLMISRTPEVTCVVVDVSHEDPEVKFNWYVDGVEVHNAKTKPREEQYNSTYRVVSVLTVLHQDWLNGKEYKCKVSNKALPAPIEKTISKAKGQPREPQVYTLPPSRDELTKNQVSLTCLVKGFYPSDIAVEWESNGQPENNYKTTPPVLDSDGSFFLYSKLTVDKSRWQQGNVFSCSVMHEALHNHYTQKSLSLSPGK

SEQ ID NO: 95 - protein, 482 aa, Artificial Sequence
  SEQ ID NO: 95 - scFv fragment  humanized SP34 VH1-VL27 - human IgG1 Fc fusion
EVQLVESGGGLVQPGGSLRLSCAASGFTFNTYAMNWVRQAPGKGLEWVARIRSKYNNYATYYADSVKGRFTISRDDSKNTLYLQMNSLRAEDTAVYYCVRHGNFGNSYVSWFAYWGQGTTVTVSSGGGGSGGGGSGGGGSEIVVTQSPATLSVSPGERATLSCRSSTGAVTTSAAANWVQEKPGQAFRGLIGGANKRAPGVPARFSGSLSGDEATLTISSLQSEDFAVYYCALWYSNLWVFGQGTKLEIKGGGGTDKTHTCPPCPAPELLGGPSVFLFPPKPKDTLMISRTPEVTCVVVDVSHEDPEVKFNWYVDGVEVHNAKTKPREEQYNSTYRVVSVLTVLHQDWLNGKEYKCKVSNKALPAPIEKTISKAKGQPREPQVYTLPPSRDELTKNQVSLTCLVKGFYPSDIAVEWESNGQPENNYKTTPPVLDSDGSFFLYSKLTVDKSRWQQGNVFSCSVMHEALHNHYTQKSLSLSPGK

SEQ ID NO: 96 - protein, 482 aa, Artificial Sequence
  SEQ ID NO: 96 - scFv fragment  humanized SP34 VH1-VL28 - human IgG1 Fc fusion
EVQLVESGGGLVQPGGSLRLSCAASGFTFNTYAMNWVRQAPGKGLEWVARIRSKYNNYATYYADSVKGRFTISRDDSKNTLYLQMNSLRAEDTAVYYCVRHGNFGNSYVSWFAYWGQGTTVTVSSGGGGSGGGGSGGGGSEIVVTQSPATLSVSPGERATLSCRSSTGAVTTSNYANWVQEKPGQAFRGLIGGAAARAPGVPARFSGSLSGDEATLTISSLQSEDFAVYYCALWYSNLWVFGQGTKLEIKGGGGTDKTHTCPPCPAPELLGGPSVFLFPPKPKDTLMISRTPEVTCVVVDVSHEDPEVKFNWYVDGVEVHNAKTKPREEQYNSTYRVVSVLTVLHQDWLNGKEYKCKVSNKALPAPIEKTISKAKGQPREPQVYTLPPSRDELTKNQVSLTCLVKGFYPSDIAVEWESNGQPENNYKTTPPVLDSDGSFFLYSKLTVDKSRWQQGNVFSCSVMHEALHNHYTQKSLSLSPGK

SEQ ID NO: 97 - protein, 482 aa, Artificial Sequence
  SEQ ID NO: 97 - scFv fragment  humanized SP34 VH1-VL29 - human IgG1 Fc fusion
EVQLVESGGGLVQPGGSLRLSCAASGFTFNTYAMNWVRQAPGKGLEWVARIRSKYNNYATYYADSVKGRFTISRDDSKNTLYLQMNSLRAEDTAVYYCVRHGNFGNSYVSWFAYWGQGTTVTVSSGGGGSGGGGSGGGGSEIVVTQSPATLSVSPGERATLSCRSSTGAVTTSNYANWVQEKPGQAFRGLIGGANKAAAGVPARFSGSLSGDEATLTISSLQSEDFAVYYCALWYSNLWVFGQGTKLEIKGGGGTDKTHTCPPCPAPELLGGPSVFLFPPKPKDTLMISRTPEVTCVVVDVSHEDPEVKFNWYVDGVEVHNAKTKPREEQYNSTYRVVSVLTVLHQDWLNGKEYKCKVSNKALPAPIEKTISKAKGQPREPQVYTLPPSRDELTKNQVSLTCLVKGFYPSDIAVEWESNGQPENNYKTTPPVLDSDGSFFLYSKLTVDKSRWQQGNVFSCSVMHEALHNHYTQKSLSLSPGK

SEQ ID NO: 98 - protein, 482 aa, Artificial Sequence
  SEQ ID NO: 98 - scFv fragment  humanized SP34 VH1-VL30 - human IgG1 Fc fusion
EVQLVESGGGLVQPGGSLRLSCAASGFTFNTYAMNWVRQAPGKGLEWVARIRSKYNNYATYYADSVKGRFTISRDDSKNTLYLQMNSLRAEDTAVYYCVRHGNFGNSYVSWFAYWGQGTTVTVSSGGGGSGGGGSGGGGSEIVVTQSPATLSVSPGERATLSCRSSTGAVTTSNYANWVQEKPGQAFRGLIGGANKRAPGVPARFSGSLSGDEATLTISSLQSEDFAVYYCALWAANLWVFGQGTKLEIKGGGGTDKTHTCPPCPAPELLGGPSVFLFPPKPKDTLMISRTPEVTCVVVDVSHEDPEVKFNWYVDGVEVHNAKTKPREEQYNSTYRVVSVLTVLHQDWLNGKEYKCKVSNKALPAPIEKTISKAKGQPREPQVYTLPPSRDELTKNQVSLTCLVKGFYPSDIAVEWESNGQPENNYKTTPPVLDSDGSFFLYSKLTVDKSRWQQGNVFSCSVMHEALHNHYTQKSLSLSPGK

SEQ ID NO: 99 - protein, 482 aa, Artificial Sequence
  SEQ ID NO: 99 - scFv fragment  humanized SP34 VH1-VL31 - human IgG1 Fc fusion
EVQLVESGGGLVQPGGSLRLSCAASGFTFNTYAMNWVRQAPGKGLEWVARIRSKYNNYATYYADSVKGRFTISRDDSKNTLYLQMNSLRAEDTAVYYCVRHGNFGNSYVSWFAYWGQGTTVTVSSGGGGSGGGGSGGGGSEIVVTQSPATLSVSPGERATLSCRSSTGAVTTSNYANWVQEKPGQAFRGLIGGANKRAPGVPARFSGSLSGDEATLTISSLQSEDFAVYYCALWYSALWVFGQGTKLEIKGGGGTDKTHTCPPCPAPELLGGPSVFLFPPKPKDTLMISRTPEVTCVVVDVSHEDPEVKFNWYVDGVEVHNAKTKPREEQYNSTYRVVSVLTVLHQDWLNGKEYKCKVSNKALPAPIEKTISKAKGQPREPQVYTLPPSRDELTKNQVSLTCLVKGFYPSDIAVEWESNGQPENNYKTTPPVLDSDGSFFLYSKLTVDKSRWQQGNVFSCSVMHEALHNHYTQKSLSLSPGK

SEQ ID NO: 100 - protein, 482 aa, Artificial Sequence
  SEQ ID NO: 100 - scFv fragment  humanized SP34 VH5-VL32 - human IgG1 Fc fusion
EVQLVESGGGLVQPGGSLRLSCAASGFTFNTYAMNWVRQAPGKGLEWVARIRSKYNNYATYYADSVKGRFTISRDDSKNTLYLQMNSLRAEDTAVYYCVRHGNFGNSYVSYFAYWGQGTTVTVSSGGGGSGGGGSGGGGSEIVVTQSPATLSVSPGERATLSCRSSTGAVTAANYANWVQEKPGQAFRGLIGGANKRAPGVPARFSGSLSGDEATLTISSLQSEDFAVYYCALFYSNLWVFGQGTKLEIKGGGGTDKTHTCPPCPAPELLGGPSVFLFPPKPKDTLMISRTPEVTCVVVDVSHEDPEVKFNWYVDGVEVHNAKTKPREEQYNSTYRVVSVLTVLHQDWLNGKEYKCKVSNKALPAPIEKTISKAKGQPREPQVYTLPPSRDELTKNQVSLTCLVKGFYPSDIAVEWESNGQPENNYKTTPPVLDSDGSFFLYSKLTVDKSRWQQGNVFSCSVMHEALHNHYTQKSLSLSPGK

SEQ ID NO: 101 - protein, 125 aa, Artificial Sequence
  SEQ ID NO: 101 - SP34 humanized VH1 domain
EVQLVESGGGLVQPGGSLRLSCAASGFTFNTYAMNWVRQAPGKGLEWVARIRSKYNNYATYYADSVKGRFTISRDDSKNTLYLQMNSLRAEDTAVYYCVRHGNFGNSYVSWFAYWGQGTTVTVSS

SEQ ID NO: 102 - protein, 125 aa, Artificial Sequence
  SEQ ID NO: 102 - SP34 humanized VH2 domain
EVQLVESGGGLVQPGGSLRLSCAASGFTFNTYAMNWVRQAPGKGLEWVARIRSKYNNYATYYADSVKSRFTISRDDSKNTLYLQMNSLRAEDTAVYYCVRHGNFGNSYVSWFAYWGQGTTVTVSS

SEQ ID NO: 103 - protein, 125 aa, Artificial Sequence
  SEQ ID NO: 103 - SP34 humanized VH3 domain
EVQLVESGGGLVQPGGSLRLSCAASGFTFNTYAMNWVRQAPGKGLEWVARIRSKYNNYATYYADSVKSRFTISRDDSKNTLYLQMNSLRAEDTAVYYCVRHGNFGNSYVSYFAYWGQGTTVTVSS

SEQ ID NO: 104 - protein, 125 aa, Artificial Sequence
  SEQ ID NO: 104 - SP34 humanized VH5 domain
EVQLVESGGGLVQPGGSLRLSCAASGFTFNTYAMNWVRQAPGKGLEWVARIRSKYNNYATYYADSVKGRFTISRDDSKNTLYLQMNSLRAEDTAVYYCVRHGNFGNSYVSYFAYWGQGTTVTVSS

SEQ ID NO: 105 - protein, 110 aa, Artificial Sequence
  SEQ ID NO: 105 - SP34 humanized VL21 domain
EIVVTQSPATLSVSPGERATLSCRSSTGAVTTSNYANWVQEKPGQAFRGLIGGANKRAPGVPARFSGSLSGDEATLTISSLQSEDFAVYYCALWYSNLWVFGQGTKLEIK

SEQ ID NO: 106 - protein, 110 aa, Artificial Sequence
  SEQ ID NO: 106 - SP34 humanized VL32 domain
EIVVTQSPATLSVSPGERATLSCRSSTGAVTAANYANWVQEKPGQAFRGLIGGANKRAPGVPARFSGSLSGDEATLTISSLQSEDFAVYYCALFYSNLWVFGQGTKLEIK

SEQ ID NO: 107 - protein, 242 aa, Artificial Sequence
  SEQ ID NO: 107 - Humanized anti-HER2 antibody 4D5 - scFv fragment
EVQLVESGGGLVQPGGSLRLSCAASGFNIKDTYIHWVRQAPGKGLEWVARIYPTNGYTRYADSVKGRFTISADTSKNTAYLQMNSLRAEDTAVYYCSRWGGDGFYAMDYWGQGTLVTVSSGGGGSGGGGSGGGGSDIQMTQSPSSLSASVGDRVTITCRASQDVNTAVAWYQQKPGKAPKLLIYSASFLYSGVPSRFSGSRSGTDFTLTISSLQPEDFATYYCQQHYTTPPTFGQGTKVEIK

SEQ ID NO: 108 - protein, 120 aa, Artificial Sequence
  SEQ ID NO: 108 - Humanized anti-HER2 antibody 4D5 - FAB  fragment heavy chain (VH-VH1)with VH:G65S substitution
EVQLVESGGGLVQPGGSLRLSCAASGFNIKDTYIHWVRQAPGKGLEWVARIYPTNGYTRYADSVKSRFTISADTSKNTAYLQMNSLRAEDTAVYYCSRWGGDGFYAMDYWGQGTLVTVSS

SEQ ID NO: 109 - protein, 242 aa, Artificial Sequence
  SEQ ID NO: 109 - Humanized anti-HER2 antibody 4D5 - scFv fragment with VH:G65S substitution
EVQLVESGGGLVQPGGSLRLSCAASGFNIKDTYIHWVRQAPGKGLEWVARIYPTNGYTRYADSVKSRFTISADTSKNTAYLQMNSLRAEDTAVYYCSRWGGDGFYAMDYWGQGTLVTVSSGGGGSGGGGSGGGGSDIQMTQSPSSLSASVGDRVTITCRASQDVNTAVAWYQQKPGKAPKLLIYSASFLYSGVPSRFSGSRSGTDFTLTISSLQPEDFATYYCQQHYTTPPTFGQGTKVEIK

SEQ ID NO: 110 - protein, 120 aa, Artificial Sequence
  SEQ ID NO: 110 - Humanized anti-HER2 antibody 4D5 - FAB  fragment heavy chain (VH-VH1)with VH:N82aS substitution
EVQLVESGGGLVQPGGSLRLSCAASGFNIKDTYIHWVRQAPGKGLEWVARIYPTNGYTRYADSVKGRFTISADTSKNTAYLQMSSLRAEDTAVYYCSRWGGDGFYAMDYWGQGTLVTVSS

SEQ ID NO: 111 - protein, 242 aa, Artificial Sequence
  SEQ ID NO: 111 - Humanized anti-HER2 antibody 4D5 - scFv fragment with VH:N82aS substitution
EVQLVESGGGLVQPGGSLRLSCAASGFNIKDTYIHWVRQAPGKGLEWVARIYPTNGYTRYADSVKGRFTISADTSKNTAYLQMSSLRAEDTAVYYCSRWGGDGFYAMDYWGQGTLVTVSSGGGGSGGGGSGGGGSDIQMTQSPSSLSASVGDRVTITCRASQDVNTAVAWYQQKPGKAPKLLIYSASFLYSGVPSRFSGSRSGTDFTLTISSLQPEDFATYYCQQHYTTPPTFGQGTKVEIK

SEQ ID NO: 112 - protein, 109 aa, Artificial Sequence
  SEQ ID NO: 112 - OKT10 mouse VH domain
QVELVESGGSLKLSCAASGFDFSRSWMNWVRQAPGKGLEWIGEINPDSSTINYTTSLKDKFIISRDNAKNTLYLQMTKVRSEDTALYYCARYGNWFPYWGQGTLVTVSS

SEQ ID NO: 113 - protein, 108 aa, Artificial Sequence
  SEQ ID NO: 113 - OKT10 mouse VL domain
DILMTQSQKIMPTSVGDRVSVTCKASQNVDTNVAWYQQKPGQSPKALIYSASYRYSGVPDRFTGSGSGTDFTLTITNVQSEDLAEYFCQQYDSYPLTFGAGTKLDLKR

SEQ ID NO: 114 - protein, 119 aa, Artificial Sequence
  SEQ ID NO: 114 - HB-7 mouse VH domain
KVQLQESGPSLVQPSQRLSITCTVSGFSLISYGVHWVRQSPGKGLEWLGVIWRGGSTDYNAAFMSRLSITKDNSKSQVFFKMNSLQADDTAIYFCAKTLITTGYAMDYWGQGTTVTVSS

SEQ ID NO: 115 - protein, 106 aa, Artificial Sequence
  SEQ ID NO: 115 - HB-7 mouse VL domain
DIELTQSPSSFSVSLGDRVTITCKASEDIYNRLAWYQQKPGNAPRLLISGATSLETGVPSRFSGSGSGKDYTLSITSLQTEDVATYYCQQYWSTPTFGGGTKLEIK

SEQ ID NO: 116 - protein, 119 aa, Artificial Sequence
  SEQ ID NO: 116 - Humanized HB-7 best-fit VH domain
QVQLQESGPGLVKPSETLSLTCTVSGFSLISYGVHWVRQPPGKGLEWLGVIWRGGSTDYNAAFMSRLTISKDNSKNQVSLKLSSVTAADTAVYFCAKTLITTGYAMDYWGQGTLVTVSS

SEQ ID NO: 117 - protein, 106 aa, Artificial Sequence
  SEQ ID NO: 117 - Humanized HB-7 best-fit VL domain
DIQLTQSPSSLSASVGDRVTITCRASEDIYNRLAWYQQKPGKAPKLLISGATSLETGVPSRFSGSGSGKDYTLTISSLQPEDFATYYCQQYWSTPTFGQGTKLEIK

SEQ ID NO: 118 - protein, 449 aa, Artificial Sequence
  SEQ ID NO: 118 - Humanized HB-7 best-fit heavy chain
QVQLQESGPGLVKPSETLSLTCTVSGFSLISYGVHWVRQPPGKGLEWLGVIWRGGSTDYNAAFMSRLTISKDNSKNQVSLKLSSVTAADTAVYFCAKTLITTGYAMDYWGQGTLVTVSSASTKGPSVFPLAPSSKSTSGGTAALGCLVKDYFPEPVTVSWNSGALTSGVHTFPAVLQSSGLYSLSSVVTVPSSSLGTQTYICNVNHKPSNTKVDKKVEPKSCDKTHTCPPCPAPELLGGPSVFLFPPKPKDTLMISRTPEVTCVVVDVSHEDPEVKFNWYVDGVEVHNAKTKPREEQYNSTYRVVSVLTVLHQDWLNGKEYKCKVSNKALPAPIEKTISKAKGQPREPQVYTLPPSRDELTKNQVSLTCLVKGFYPSDIAVEWESNGQPENNYKTTPPVLDSDGSFFLYSKLTVDKSRWQQGNVFSCSVMHEALHNHYTQKSLSLSPGK

SEQ ID NO: 119 - protein, 213 aa, Artificial Sequence
  SEQ ID NO: 119 - Humanized HB-7 best-fit light chain
DIQLTQSPSSLSASVGDRVTITCRASEDIYNRLAWYQQKPGKAPKLLISGATSLETGVPSRFSGSGSGKDYTLTISSLQPEDFATYYCQQYWSTPTFGQGTKLEIKRTVAAPSVFIFPPSDEQLKSGTASVVCLLNNFYPREAKVQWKVDNALQSGNSQESVTEQDSKDSTYSLSSTLTLSKADYEKHKVYACEVTHQGLSSPVTKSFNRGEC

SEQ ID NO: 120 - protein, 449 aa, Artificial Sequence
  SEQ ID NO: 120 - Chimeric HB-7 heavy chain IgG1
KVQLQESGPSLVQPSQRLSITCTVSGFSLISYGVHWVRQSPGKGLEWLGVIWRGGSTDYNAAFMSRLSITKDNSKSQVFFKMNSLQADDTAIYFCAKTLITTGYAMDYWGQGTTVTVSSASTKGPSVFPLAPSSKSTSGGTAALGCLVKDYFPEPVTVSWNSGALTSGVHTFPAVLQSSGLYSLSSVVTVPSSSLGTQTYICNVNHKPSNTKVDKKVEPKSCDKTHTCPPCPAPELLGGPSVFLFPPKPKDTLMISRTPEVTCVVVDVSHEDPEVKFNWYVDGVEVHNAKTKPREEQYNSTYRVVSVLTVLHQDWLNGKEYKCKVSNKALPAPIEKTISKAKGQPREPQVYTLPPSRDELTKNQVSLTCLVKGFYPSDIAVEWESNGQPENNYKTTPPVLDSDGSFFLYSKLTVDKSRWQQGNVFSCSVMHEALHNHYTQKSLSLSPGK

SEQ ID NO: 121 - protein, 213 aa, Artificial Sequence
  SEQ ID NO: 121 - Chimeric HB-7 human kappa light chain
DIELTQSPSSFSVSLGDRVTITCKASEDIYNRLAWYQQKPGNAPRLLISGATSLETGVPSRFSGSGSGKDYTLSITSLQTEDVATYYCQQYWSTPTFGGGTKLEIKRTVAAPSVFIFPPSDEQLKSGTASVVCLLNNFYPREAKVQWKVDNALQSGNSQESVTEQDSKDSTYSLSSTLTLSKADYEKHKVYACEVTHQGLSSPVTKSFNRGEC

SEQ ID NO: 122 - protein, 121 aa, Artificial Sequence
  SEQ ID NO: 122 - 9G7 mouse VH domain
QVTLKESGPGILQPSQTLSLTCSFSGLSLSTSGKGVGWIRQPSGKGLEWLAHIWWDDDKRYNPALKSRLTISKDTSSNQVFLKIASVDTADTATYYCARIELGRSYVMDYWGQGTTVTVSS

SEQ ID NO: 123 - protein, 107 aa, Artificial Sequence
  SEQ ID NO: 123 - 9G7 mouse VL domain
DIVMTQSHKFMSTSVGDRVSISCKASQDVITSVAWFQQKPGQSPKLLIYSASYRYTGVPDRFTGSGSGTDFTFTISSVQAEDLAVYYCQQHYTIPLTFGAGTKLELK

SEQ ID NO: 124 - protein, 451 aa, Artificial Sequence
  SEQ ID NO: 124 - Humanized 9G7 best-fit heavy chain
QVTLKESGPTLVKPTQTLTLTCTFSGLSLSTSGKGVGWIRQPPGKALEWLAHIWWDDDKRYNPALKSRLTITKDTSKNQVVLTMTNMDPVDTATYYCARIELGRSYVMDYWGQGTLVTVSSASTKGPSVFPLAPSSKSTSGGTAALGCLVKDYFPEPVTVSWNSGALTSGVHTFPAVLQSSGLYSLSSVVTVPSSSLGTQTYICNVNHKPSNTKVDKKVEPKSCDKTHTCPPCPAPELLGGPSVFLFPPKPKDTLMISRTPEVTCVVVDVSHEDPEVKFNWYVDGVEVHNAKTKPREEQYNSTYRVVSVLTVLHQDWLNGKEYKCKVSNKALPAPIEKTISKAKGQPREPQVYTLPPSRDELTKNQVSLTCLVKGFYPSDIAVEWESNGQPENNYKTTPPVLDSDGSFFLYSKLTVDKSRWQQGNVFSCSVMHEALHNHYTQKSLSLSPGK

SEQ ID NO: 125 - protein, 214 aa, Artificial Sequence
  SEQ ID NO: 125 - Humanized 9G7 best-fit first prototype light chain
DIQMTQSPSSLSASVGDRVTITCQASQDVITSVAWFQQKPGKAPKLLIYSASYRYTGVPSRFSGSGSGTDFTFTISSLQPEDIATYYCQQHYTIPLTFGQGTKLEIKRTVAAPSVFIFPPSDEQLKSGTASVVCLLNNFYPREAKVQWKVDNALQSGNSQESVTEQDSKDSTYSLSSTLTLSKADYEKHKVYACEVTHQGLSSPVTKSFNRGEC

SEQ ID NO: 126 - protein, 451 aa, Artificial Sequence
  SEQ ID NO: 126 - Chimeric 9G7 heavy chain IgG1
QVTLKESGPGILQPSQTLSLTCSFSGLSLSTSGKGVGWIRQPSGKGLEWLAHIWWDDDKRYNPALKSRLTISKDTSSNQVFLKIASVDTADTATYYCARIELGRSYVMDYWGQGTTVTVSSASTKGPSVFPLAPSSKSTSGGTAALGCLVKDYFPEPVTVSWNSGALTSGVHTFPAVLQSSGLYSLSSVVTVPSSSLGTQTYICNVNHKPSNTKVDKKVEPKSCDKTHTCPPCPAPELLGGPSVFLFPPKPKDTLMISRTPEVTCVVVDVSHEDPEVKFNWYVDGVEVHNAKTKPREEQYNSTYRVVSVLTVLHQDWLNGKEYKCKVSNKALPAPIEKTISKAKGQPREPQVYTLPPSRDELTKNQVSLTCLVKGFYPSDIAVEWESNGQPENNYKTTPPVLDSDGSFFLYSKLTVDKSRWQQGNVFSCSVMHEALHNHYTQKSLSLSPGK

SEQ ID NO: 127 - protein, 214 aa, Artificial Sequence
  SEQ ID NO: 127 - Chimeric 9G7 human kappa light chain
DIVMTQSHKFMSTSVGDRVSISCKASQDVITSVAWFQQKPGQSPKLLIYSASYRYTGVPDRFTGSGSGTDFTFTISSVQAEDLAVYYCQQHYTIPLTFGAGTKLELKRTVAAPSVFIFPPSDEQLKSGTASVVCLLNNFYPREAKVQWKVDNALQSGNSQESVTEQDSKDSTYSLSSTLTLSKADYEKHKVYACEVTHQGLSSPVTKSFNRGEC

SEQ ID NO: 128 - protein, 214 aa, Artificial Sequence
  SEQ ID NO: 128 - Humanized 9G7 best-fit light chain (prototype light chain with F36Y substitution)
DIQMTQSPSSLSASVGDRVTITCQASQDVITSVAWYQQKPGKAPKLLIYSASYRYTGVPSRFSGSGSGTDFTFTISSLQPEDIATYYCQQHYTIPLTFGQGTKLEIKRTVAAPSVFIFPPSDEQLKSGTASVVCLLNNFYPREAKVQWKVDNALQSGNSQESVTEQDSKDSTYSLSSTLTLSKADYEKHKVYACEVTHQGLSSPVTKSFNRGEC

SEQ ID NO: 129 - protein, 121 aa, Artificial Sequence
  SEQ ID NO: 129 - Humanized 9G7 best-fit VH domain
QVTLKESGPTLVKPTQTLTLTCTFSGLSLSTSGKGVGWIRQPPGKALEWLAHIWWDDDKRYNPALKSRLTITKDTSKNQVVLTMTNMDPVDTATYYCARIELGRSYVMDYWGQGTLVTVSS

SEQ ID NO: 130 - protein, 107 aa, Artificial Sequence
  SEQ ID NO: 130 - Humanized 9G7 best-fit VL domain
DIQMTQSPSSLSASVGDRVTITCQASQDVITSVAWFQQKPGKAPKLLIYSASYRYTGVPSRFSGSGSGTDFTFTISSLQPEDIATYYCQQHYTIPLTFGQGTKLEIK

SEQ ID NO: 131 - protein, 451 aa, Artificial Sequence
  SEQ ID NO: 131 - Humanized 9G7 best-framework heavy chain
EVQLVESGGGLVQPGGSLRLSCAFSGLSLSTSGKGVGWIRQAPGKGLEWLAHIWWDDDKRYNPALKSRLTISKDTSKNTVYLQMNSLRAEDTAVYYCARIELGRSYVMDYWGQGTLVTVSSASTKGPSVFPLAPSSKSTSGGTAALGCLVKDYFPEPVTVSWNSGALTSGVHTFPAVLQSSGLYSLSSVVTVPSSSLGTQTYICNVNHKPSNTKVDKKVEPKSCDKTHTCPPCPAPELLGGPSVFLFPPKPKDTLMISRTPEVTCVVVDVSHEDPEVKFNWYVDGVEVHNAKTKPREEQYNSTYRVVSVLTVLHQDWLNGKEYKCKVSNKALPAPIEKTISKAKGQPREPQVYTLPPSRDELTKNQVSLTCLVKGFYPSDIAVEWESNGQPENNYKTTPPVLDSDGSFFLYSKLTVDKSRWQQGNVFSCSVMHEALHNHYTQKSLSLSPGK

SEQ ID NO: 132 - protein, 214 aa, Artificial Sequence
  SEQ ID NO: 132 - Humanized 9G7 best-framework light chain
DIQMTQSPSSLSASVGDRVTITCRASQDVITSVAWFQQKPGKAPKLLIYSASYRYTGVPSRFSGSGSGTDFTLTISSLQPEDFATYYCQQHYTIPLTFGQGTKVEIKRTVAAPSVFIFPPSDEQLKSGTASVVCLLNNFYPREAKVQWKVDNALQSGNSQESVTEQDSKDSTYSLSSTLTLSKADYEKHKVYACEVTHQGLSSPVTKSFNRGEC

SEQ ID NO: 133 - protein, 121 aa, Artificial Sequence
  SEQ ID NO: 133 - Humanized 9G7 best-framework VH domain
EVQLVESGGGLVQPGGSLRLSCAFSGLSLSTSGKGVGWIRQAPGKGLEWLAHIWWDDDKRYNPALKSRLTISKDTSKNTVYLQMNSLRAEDTAVYYCARIELGRSYVMDYWGQGTLVTVSS

SEQ ID NO: 134 - protein, 107 aa, Artificial Sequence
  SEQ ID NO: 134 - Humanized 9G7 best-framework VL domain
DIQMTQSPSSLSASVGDRVTITCRASQDVITSVAWFQQKPGKAPKLLIYSASYRYTGVPSRFSGSGSGTDFTLTISSLQPEDFATYYCQQHYTIPLTFGQGTKVEIK

SEQ ID NO: 135 - protein, 118 aa, Artificial Sequence
  SEQ ID NO: 135 - Human clone 767 VH domain
QVQLVESGGGLVQPGGSLRLSCAASGFTFSSYWMSWVRQAPGKGLEWVANIKQDGSEKYYVDSVKGRFTISRDNAKNSLYLQMNSLRAEDTAVYYCAREGRTGYFDYWGQGTLVTVSS

SEQ ID NO: 136 - protein, 111 aa, Artificial Sequence
  SEQ ID NO: 136 - Human clone 767 VL domain
QSVLTQPPSASGTPGQRVTISCSGSTSNIGTNYVYWYQQLPGTAPKLLIYRNDQRPSGVPDRFSGSKSGTSASLAISGLRSEDEADYYCAAWDDSRSGVYAFGTGTKVTVL

SEQ ID NO: 137 - protein, 448 aa, Artificial Sequence
  SEQ ID NO: 137 - Human 767 heavy chain
QVQLVESGGGLVQPGGSLRLSCAASGFTFSSYWMSWVRQAPGKGLEWVANIKQDGSEKYYVDSVKGRFTISRDNAKNSLYLQMNSLRAEDTAVYYCAREGRTGYFDYWGQGTLVTVSSASTKGPSVFPLAPSSKSTSGGTAALGCLVKDYFPEPVTVSWNSGALTSGVHTFPAVLQSSGLYSLSSVVTVPSSSLGTQTYICNVNHKPSNTKVDKKVEPKSCDKTHTCPPCPAPELLGGPSVFLFPPKPKDTLMISRTPEVTCVVVDVSHEDPEVKFNWYVDGVEVHNAKTKPREEQYNSTYRVVSVLTVLHQDWLNGKEYKCKVSNKALPAPIEKTISKAKGQPREPQVYTLPPSRDELTKNQVSLTCLVKGFYPSDIAVEWESNGQPENNYKTTPPVLDSDGSFFLYSKLTVDKSRWQQGNVFSCSVMHEALHNHYTQKSLSLSPGK

SEQ ID NO: 138 - protein, 218 aa, Artificial Sequence
  SEQ ID NO: 138 - Human 767 light chain
QSVLTQPPSASGTPGQRVTISCSGSTSNIGTNYVYWYQQLPGTAPKLLIYRNDQRPSGVPDRFSGSKSGTSASLAISGLRSEDEADYYCAAWDDSRSGVYAFGTGTKVTVLRTVAAPSVFIFPPSDEQLKSGTASVVCLLNNFYPREAKVQWKVDNALQSGNSQESVTEQDSKDSTYSLSSTLTLSKADYEKHKVYACEVTHQGLSSPVTKSFNRGEC

SEQ ID NO: 139 - protein, 118 aa, Artificial Sequence
  SEQ ID NO: 139 - Mouse anti-human OX40 antibody VH domain from WO2013/008171
QVTLKESGPGILQPSQTLSLTCSFSGFSLSTSGMGVGWIRQPSGKGLEWLAHIWWDDDKYYNTALKSGLTISKDTSKNQVFLKIASVDTTDTATYYCARIDWDGFAYWGQGTLVTVSS

SEQ ID NO: 140 - protein, 106 aa, Artificial Sequence
  SEQ ID NO: 140 - Mouse anti-human OX40 antibody VL domain from WO2013/008171
QIVLTQSPAILSASPGEKVTMTCRASSSVSYMHWYQQKPGSSPKPWIYATSNLASGVPARFSGSGSGTSYSLTINRVEAEDAATYYCQQWSSNPWTFGGGTKLEIK

SEQ ID NO: 141 - protein, 118 aa, Artificial Sequence
  SEQ ID NO: 141 - Humanized anti-human OX40 antibody VH domain from WO2013/008171
QVTLKESGPALVKPTQTLTLTCSFSGFSLSTSGMGVGWIRQPPGKALEWIAHIWWDDDKYYNTALKTRLTISKDTSKNQVVLTMTNMDPVDTATYYCARIDWDGFAYWGQGTLVTVSS

SEQ ID NO: 142 - protein, 106 aa, Artificial Sequence
  SEQ ID NO: 142 - Humanized anti-human OX40 antibody VL domain from WO2013/008171
EIVLTQSPATLSLSPGERATLSCRASSSVSYMHWYQQKPGQAPRPWIYATSNRATGIPARFSGSGSGTDYTLTISSLEPEDFAVYYCQQWSSNPWTFGQGTKVEIK

SEQ ID NO: 143 - protein, 121 aa, Artificial Sequence [sequence omitted]

SEQ ID NO: 144 - protein, 108 aa, Artificial Sequence
  SEQ ID NO: 144 - rituximab mouse VL domain
QIVLSQSPAILSASPGEKVTMETTCRASSSVSYIHWFQQKPGSSPKPWIYATSNLASGVPVRFSGSGSGTSYSLTISRVEAEDAATYYCQQWTSNPPTFGGGTKLEIK

SEQ ID NO: 145 - protein, 119 aa, Artificial Sequence
  SEQ ID NO: 145 - cetuximab mouse VH domain
QVQLKQSGPGLVQPSQSLSITCTVSGFSLTNYGVHWVRQSPGKGLEWLGVIWSGGNTDYNTPFTSRLSINKDNSKSQVFFKMNSLQSNDTAIYYCARALTYYDYEFAYWGQGTLVTVSA

SEQ ID NO: 146 - protein, 107 aa, Artificial Sequence
  SEQ ID NO: 146 - cetuximab mouse VL domain
DILLTQSPVILSVSPGERVSFSCRASQSIGTNIHWYQQRTNGSPRLLIKYASESISGIPSRFSGSGSGTDFTLSINSVESEDIADYYCQQNNNWPTTFGAGTKLELK

SEQ ID NO: 147 - protein, 107 aa, Artificial Sequence
  SEQ ID NO: 147 - BTA CH3 NO: 1 Original BTA  11
GQPREPQVYTLPPSRDELTKNQVKLVCLVTGFYPSDIAVEWESNGQPENNYYTTPPVLDSDGSFSLVSWLNVDKSRWQQGNVFSCSVMHEALHNHYTQKSLSLSPGK

SEQ ID NO: 148 - protein, 107 aa, Artificial Sequence
  SEQ ID NO: 148 - BTA CH3 NO: 2 BTA FTO 11
GQPREPAVYTLPPSRDELTKNQVKLVCLVTGFYPSDIAVEWESNGQPENNYYTTPPVLDSDGSFSLVSWLNVDKSRWQQGNVFSCSVMHEALHNHYTQKSLSLSPGK

SEQ ID NO: 149 - protein, 107 aa, Artificial Sequence
  SEQ ID NO: 149 - BTA CH3 NO: 3 BTA FTO 33 411D
GQPREPAVYTLPPSREEMTKNQVKLVCLVTGFYPSDIAVEWESSGQPENNYYTTPPMLDSDGSFSLVSWLDVDKSRWQQGNIFSCSVMHEALHNRFTQKSLSLSPGK

SEQ ID NO: 150 - protein, 107 aa, Artificial Sequence
  SEQ ID NO: 150 - BTB CH3 NO: 1 Original BTB
GQPREPEVATFPPSRDELTKNQVTLVCLVTGFYPSDIAVEWESNGQPENNYKTDPPLLESDGSFALSSRLRVDKSRWQQGNVFSCSVMHEALHNHYTQKSLSLSPGK

SEQ ID NO: 151 - protein, 107 aa, Artificial Sequence
  SEQ ID NO: 151 - BTB CH3 NO: 2 BTB 401R 11
GQPREPEVATFPPSRDELTKNQVTLVCLVTGFYPSDIAVEWESNGQPENNYKTDPPLLESRGSFALSSRLRVDKSRWQQGNVFSCSVMHEALHNHYTQKSLSLSPGK

SEQ ID NO: 152 - protein, 107 aa, Artificial Sequence
  SEQ ID NO: 152 - BTB CH3 No: 3 BTB 401Q 11
GQPREPEVATFPPSRDELTKNQVTLVCLVTGFYPSDIAVEWESNGQPENNYKTDPPLLESQGSFALSSRLRVDKSRWQQGNVFSCSVMHEALHNHYTQKSLSLSPGK

SEQ ID NO: 153 - protein, 107 aa, Artificial Sequence
  SEQ ID NO: 153 - BTA CH3 NO: 4 BTA 11_FTO_N411T
GQPREPAVYTLPPSRDELTKNQVKLVCLVTGFYPSDIAVEWESNGQPENNYYTTPPVLDSDGSFSLVSWLTVDKSRWQQGNVFSCSVMHEALHNHYTQKSLSLSPGK

SEQ ID NO: 154 - protein, 107 aa, Artificial Sequence
  SEQ ID NO: 154 - BTA CH3 NO: 5 BTA 33_FTO
GQPREPAVYTLPPSREEMTKNQVKLVCLVTGFYPSDIAVEWESSGQPENNYYTTPPMLDSDGSFSLVSWLNVDKSRWQQGNIFSCSVMHEALHNRFTQKSLSLSPGK

SEQ ID NO: 155 - protein, 107 aa, Artificial Sequence
  SEQ ID NO: 155 - BTA CH3 NO: 6 BTA 33_FTO_N411T
GQPREPAVYTLPPSREEMTKNQVKLVCLVTGFYPSDIAVEWESSGQPENNYYTTPPMLDSDGSFSLVSWLTVDKSRWQQGNIFSCSVMHEALHNRFTQKSLSLSPGK

SEQ ID NO: 156 - protein, 107 aa, Artificial Sequence
  SEQ ID NO: 156 - BTB CH3 No: 4 BTB 33_D401Q
GQPREPEVATFPPSREEMTKNQVTLVCLVTGFYPSDIAVEWESSGQPENNYNTDPPLLESQGSFALSSRLRVDKSRWQQGNIFSCSVMHEALHNRFTQKSLSLSPGK

SEQ ID NO: 157 - protein, 107 aa, Artificial Sequence
  SEQ ID NO: 157 - BTB CH3 No: 5 BTB 11_D401Q_R411T
GQPREPEVATFPPSRDELTKNQVTLVCLVTGFYPSDIAVEWESNGQPENNYKTDPPLLESQGSFALSSRLTVDKSRWQQGNVFSCSVMHEALHNHYTQKSLSLSPGK

SEQ ID NO: 158 - protein, 107 aa, Artificial Sequence
  SEQ ID NO: 158 - BTB CH3 No: 6 BTB 33_D401Q_R411T
GQPREPEVATFPPSREEMTKNQVTLVCLVTGFYPSDIAVEWESSGQPENNYNTDPPLLESQGSFALSSRLTVDKSRWQQGNIFSCSVMHEALHNRFTQKSLSLSPGK

SEQ ID NO: 159 - protein, 449 aa, Artificial Sequence
  SEQ ID NO: 159 - BEAT HER2/CD3-1 antibody FAB heavy chain (CD3 epsilon arm - humanized OKT3 with N82aS substitution)
EVQLVESGGGLVQPGGSLRLSCAASGYTFTRYTMHWVRQAPGKGLEWIGYINPSRGYTYYADSVKGRFTLSTDKSKNTAYLQMSSLRAEDTAVYYCARYYDDHYCLDYWGQGTLVTVSSASTKGPSVFPLAPSSKSTSGGTAALGCLVKDYFPEPVTVSWNSGALTSGVHTFPAVLQSSGLYSLSSVVTVPSSSLGTQTYICNVNHKPSNTKVDKKVEPKSCDKTHTCPPCPAPEAAGGPSVFLFPPKPKDTLMISRTPEVTCVVVDVSHEDPEVQFKWYVDGVEVHNAKTKPREEQYNSTFRVVSVLTVLHQDWLNGKEYKCKVSNKALPAPIEKTISKTKGQPREPAVYTLPPSREEMTKNQVKLVCLVTGFYPSDIAVEWESSGQPENNYYTTPPMLDSDGSFSLVSWLNVDKSRWQQGNIFSCSVMHEALHNRFTQKSLSLSPGK

SEQ ID NO: 160 - protein, 475 aa, Artificial Sequence
  SEQ ID NO: 160 - BEAT HER2/CD3-1 antibody scFv heavy chain (HER2 arm)
EVQLVESGGGLVQPGGSLRLSCAASGFNIKDTYIHWVRQAPGKGLEWVARIYPTNGYTRYADSVKGRFTISADTSKNTAYLQMNSLRAEDTAVYYCSRWGGDGFYAMDYWGQGTLVTVSSGGGGSGGGGSGGGGSDIQMTQSPSSLSASVGDRVTITCRASQDVNTAVAWYQQKPGKAPKLLIYSASFLYSGVPSRFSGSRSGTDFTLTISSLQPEDFATYYCQQHYTTPPTFGQGTKVEIKRGGGGTDKTHTCPPCPAPEAAGGPSVFLFPPKPKDTLMISRTPEVTCVVVDVSHEDPEVKFNWYVDGVEVHNAKTKPREEQYNSTYRVVSVLTVLHQDWLNGKEYKCKVSNKALPAPIEKTISKAKGQPREPEVATFPPSRDELTKNQVTLVCLVTGFYPSDIAVEWESNGQPENNYKTDPPLLESDGSFALSSRLRVDKSRWQQGNVFSCSVMHEALHNHYTQKSLSLSPGK

SEQ ID NO: 161 - protein, 450 aa, Artificial Sequence
  SEQ ID NO: 161 - BEAT HER2/CD3-2 antibody FAB heavy chain (HER2 arm)
EVQLVESGGGLVQPGGSLRLSCAASGFNIKDTYIHWVRQAPGKGLEWVARIYPTNGYTRYADSVKGRFTISADTSKNTAYLQMNSLRAEDTAVYYCSRWGGDGFYAMDYWGQGTLVTVSSASTNGPSVFPLAPSSKSTSGGTAALGCLVKDYFPEPVTVSWNSGALTSGVHTFPAVLQSSGLYSLSSVVTVPSSSLGTQTYICNVNHKPSNTKVDKKVEPKSCDKTHTCPPCPAPEAAGGPSVFLFPPKPKDTLMISRTPEVTCVVVDVSHEDPEVKFNWYVDGVEVHNAKTKPREEQYNSTYRVVSVLTVLHQDWLNGKEYKCKVSNKALPAPIEKTISKAKGQPREPAVYTLPPSRDELTKNQVKLVCLVTGFYPSDIAVEWESNGQPENNYYTTPPVLDSDGSFSLVSWLNVDKSRWQQGNVFSCSVMHEALHNHYTQKSLSLSPGK

SEQ ID NO: 162 - protein, 477 aa, Artificial Sequence
  SEQ ID NO: 162 - BEAT HER2/CD3-2 antibody scFv heavy chain (CD3 epsilon arm - humanized OKT3 with N82aS substitution)
EVQLVESGGGLVQPGGSLRLSCAASGYTFTRYTMHWVRQAPGKGLEWIGYINPSRGYTYYADSVKGRFTLSTDKSKNTAYLQMSSLRAEDTAVYYCARYYDDHYCLDYWGQGTLVTVSSGGGGSGGGGSGGGGSGGGASDIQLTQSPSSLSASVGDRVTITCRASSSVSYVAWYQQKPGKAPKRWIYDTSKLYSGVPSRFSGSGSGTDYTLTISSLQPEDFATYYCQQWSSNPPTFGQGTKVEIKGGGGTDKTHTCPPCPAPEAAGGPSVFLFPPKPKDTLMISRTPEVTCVVVDVSHEDPEVQFKWYVDGVEVHNAKTKPREEQYNSTFRVVSVLTVLHQDWLNGKEYKCKVSNKALPAPIEKTISKTKGQPREPEVATFPPSREEMTKNQVTLVCLVTGFYPSDIAVEWESSGQPENNYNTDPPLLESDGSFALSSRLRVDKSRWQQGNIFSCSVMHEALHNRFTQKSLSLSPGK

SEQ ID NO: 163 - protein, 449 aa, Artificial Sequence
  SEQ ID NO: 163 - BEAT HER2/CD3-3 antibody FAB heavy chain(CD3 epsilon arm - humanized OKT3 with G65S substitution)
EVQLVESGGGLVQPGGSLRLSCAASGYTFTRYTMHWVRQAPGKGLEWIGYINPSRGYTYYADSVKSRFTLSTDKSKNTAYLQMNSLRAEDTAVYYCARYYDDHYCLDYWGQGTLVTVSSASTKGPSVFPLAPSSKSTSGGTAALGCLVKDYFPEPVTVSWNSGALTSGVHTFPAVLQSSGLYSLSSVVTVPSSSLGTQTYICNVNHKPSNTKVDKKVEPKSCDKTHTCPPCPAPEAAGGPSVFLFPPKPKDTLMISRTPEVTCVVVDVSHEDPEVQFKWYVDGVEVHNAKTKPREEQYNSTFRVVSVLTVLHQDWLNGKEYKCKVSNKALPAPIEKTISKTKGQPREPAVYTLPPSREEMTKNQVKLVCLVTGFYPSDIAVEWESSGQPENNYYTTPPMLDSDGSFSLVSWLNVDKSRWQQGNIFSCSVMHEALHNRFTQKSLSLSPGK

SEQ ID NO: 164 - protein, 474 aa, Artificial Sequence
  SEQ ID NO: 164 - BEAT HER2/CD3-3 antibody scFv heavy chain (HER2 arm with additional disulfide bond)
EVQLVESGGGLVQPGGSLRLSCAASGFNIKDTYIHWVRQAPGKCLEWVARIYPTNGYTRYADSVKGRFTISADTSKNTAYLQMNSLRAEDTAVYYCSRWGGDGFYAMDYWGQGTLVTVSSGGGGSGGGGSGGGGSDIQMTQSPSSLSASVGDRVTITCRASQDVNTAVAWYQQKPGKAPKLLIYSASFLYSGVPSRFSGSRSGTDFTLTISSLQPEDFATYYCQQHYTTPPTFGCGTKVEIKGGGGTDKTHTCPPCPAPEAAGGPSVFLFPPKPKDTLMISRTPEVTCVVVDVSHEDPEVKFNWYVDGVEVHNAKTKPREEQYNSTYRVVSVLTVLHQDWLNGKEYKCKVSNKALPAPIEKTISKAKGQPREPEVATFPPSRDELTKNQVTLVCLVTGFYPSDIAVEWESNGQPENNYKTDPPLLESQGSFALSSRLRVDKSRWQQGNVFSCSVMHEALHNHYTQKSLSLSPGK

SEQ ID NO: 165 - protein, 455 aa, Artificial Sequence
  SEQ ID NO: 165 - BEAT HER2/CD3(SP34) antibody FAB heavy chain(CD3 epsilon arm - humanized SP34 VH from WO2008/119565)
EVQLVESGGGLVQPGGSLKLSCAASGFTFNKYAMNWVRQAPGKGLEWVARIRSKYNNYATYYADSVKDRFTISRDDSKNTAYLQMNNLKTEDTAVYYCVRHGNFGNSYISYWAYWGQGTLVTVSSASTKGPSVFPLAPSSKSTSGGTAALGCLVKDYFPEPVTVSWNSGALTSGVHTFPAVLQSSGLYSLSSVVTVPSSSLGTQTYICNVNHKPSNTKVDKKVEPKSCDKTHTCPPCPAPEAAGGPSVFLFPPKPKDTLMISRTPEVTCVVVDVSHEDPEVKFNWYVDGVEVHNAKTKPREEQYNSTYRVVSVLTVLHQDWLNGKEYKCKVSNKALPAPIEKTISKAKGQPREPAVYTLPPSRDELTKNQVKLVCLVTGFYPSDIAVEWESNGQPENNYYTTPPVLDSDGSFSLVSWLNVDKSRWQQGNVFSCSVMHEALHNHYTQKSLSLSPGK

SEQ ID NO: 166 - protein, 217 aa, Artificial Sequence
  SEQ ID NO: 166 - BEAT HER2/CD3(SP34) antibody FAB light chain(CD3 epsilon arm - humanized SP34 VL from WO2008/119565)
QTVVTQEPSLTVSPGGTVTLTCGSSTGAVTSGNYPNWVQQKPGQAPRGLIGGTKFLAPGTPARFSGSLLGGKAALTLSGVQPEDEAEYYCVLWYSNRWVFGGGTKLTVLGRTVAAPSVFIFPPSDEQLKSGTASVVCLLNNFYPREAKVQWKVDNALQSGNSQESVTEQDSKDSTYSLSSTLTLSKADYEKHKVYACEVTHQGLSSPVTKSFNRGEC

SEQ ID NO: 167 - protein, 474 aa, Artificial Sequence
  SEQ ID NO: 167 - BEAT HER2/CD3(SP34) antibody scFv heavy chain (HER2 arm with N82aS substitution)
EVQLVESGGGLVQPGGSLRLSCAASGFNIKDTYIHWVRQAPGKGLEWVARIYPTNGYTRYADSVKGRFTISADTSKNTAYLQMSSLRAEDTAVYYCSRWGGDGFYAMDYWGQGTLVTVSSGGGGSGGGGSGGGGSDIQMTQSPSSLSASVGDRVTITCRASQDVNTAVAWYQQKPGKAPKLLIYSASFLYSGVPSRFSGSRSGTDFTLTISSLQPEDFATYYCQQHYTTPPTFGQGTKVEIKGGGGTDKTHTCPPCPAPEAAGGPSVFLFPPKPKDTLMISRTPEVTCVVVDVSHEDPEVQFKWYVDGVEVHNAKTKPREEQYNSTFRVVSVLTVLHQDWLNGKEYKCKVSNKALPAPIEKTISKTKGQPREPEVATFPPSREEMTKNQVTLVCLVTGFYPSDIAVEWESSGQPENNYNTDPPLLESQGSFALSSRLRVDKSRWQQGNIFSCSVMHEALHNRFTQKSLSLSPGK

SEQ ID NO: 168 - protein, 455 aa, Artificial Sequence
  SEQ ID NO: 168 - BEAT HER2/CD3(SP34-Kappa1) antibody FAB heavy chain(CD3 epsilon arm - humanized SP34 VH1)
EVQLVESGGGLVQPGGSLRLSCAASGFTFNTYAMNWVRQAPGKGLEWVARIRSKYNNYATYYADSVKGRFTISRDDSKNTLYLQMNSLRAEDTAVYYCVRHGNFGNSYVSWFAYWGQGTTVTVSSASTKGPSVFPLAPSSKSTSGGTAALGCLVKDYFPEPVTVSWNSGALTSGVHTFPAVLQSSGLYSLSSVVTVPSSSLGTQTYICNVNHKPSNTKVDKKVEPKSCDKTHTCPPCPAPEAAGGPSVFLFPPKPKDTLMISRTPEVTCVVVDVSHEDPEVKFNWYVDGVEVHNAKTKPREEQYNSTYRVVSVLTVLHQDWLNGKEYKCKVSNKALPAPIEKTISKAKGQPREPAVYTLPPSRDELTKNQVKLVCLVTGFYPSDIAVEWESNGQPENNYYTTPPVLDSDGSFSLVSWLNVDKSRWQQGNVFSCSVMHEALHNHYTQKSLSLSPGK

SEQ ID NO: 169 - protein, 449 aa, Artificial Sequence
  SEQ ID NO: 169 - BEAT CD38-HB7bestfit/CD3 antibody FAB heavy chain (CD38 arm - humanized HB-7 best-fit)
QVQLQESGPGLVKPSETLSLTCTVSGFSLISYGVHWVRQPPGKGLEWLGVIWRGGSTDYNAAFMSRLTISKDNSKNQVSLKLSSVTAADTAVYFCAKTLITTGYAMDYWGQGTLVTVSSASTKGPSVFPLAPSSKSTSGGTAALGCLVKDYFPEPVTVSWNSGALTSGVHTFPAVLQSSGLYSLSSVVTVPSSSLGTQTYICNVNHKPSNTKVDKKVEPKSCDKTHTCPPCPAPEAAGGPSVFLFPPKPKDTLMISRTPEVTCVVVDVSHEDPEVKFNWYVDGVEVHNAKTKPREEQYNSTYRVVSVLTVLHQDWLNGKEYKCKVSNKALPAPIEKTISKAKGQPREPAVYTLPPSRDELTKNQVKLVCLVTGFYPSDIAVEWESNGQPENNYYTTPPVLDSDGSFSLVSWLNVDKSRWQQGNVFSCSVMHEALHNHYTQKSLSLSPGK

SEQ ID NO: 170 - protein, 448 aa, Artificial Sequence
  SEQ ID NO: 170 - BEAT CD38-767/CD3 antibody FAB heavy chain (CD38 arm - human clone 767)
QVQLVESGGGLVQPGGSLRLSCAASGFTFSSYWMSWVRQAPGKGLEWVANIKQDGSEKYYVDSVKGRFTISRDNAKNSLYLQMNSLRAEDTAVYYCAREGRTGYFDYWGQGTLVTVSSASTKGPSVFPLAPSSKSTSGGTAALGCLVKDYFPEPVTVSWNSGALTSGVHTFPAVLQSSGLYSLSSVVTVPSSSLGTQTYICNVNHKPSNTKVDKKVEPKSCDKTHTCPPCPAPEAAGGPSVFLFPPKPKDTLMISRTPEVTCVVVDVSHEDPEVQFKWYVDGVEVHNAKTKPREEQYNSTFRVVSVLTVLHQDWLNGKEYKCKVSNKALPAPIEKTISKTKGQPREPAVYTLPPSREEMTKNQVKLVCLVTGFYPSDIAVEWESSGQPENNYYTTPPMLDSDGSFSLVSWLNVDKSRWQQGNIFSCSVMHEALHNRFTQKSLSLSPGK

SEQ ID NO: 171 - protein, 482 aa, Artificial Sequence
  SEQ ID NO: 171 - BEAT CD38-767/CD3 antibody scFv heavy chain(CD3 epsilon arm - humanized OKT3 with G65S substitution)
EVQLVESGGGLVQPGGSLKLSCAASGFTFNKYAMNWVRQAPGKGLEWVARIRSKYNNYATYYADSVKDRFTISRDDSKNTAYLQMNNLKTEDTAVYYCVRHGNFGNSYISYWAYWGQGTLVTVSSGGGGSGGGGSGGGGSQTVVTQEPSLTVSPGGTVTLTCGSSTGAVTSGNYPNWVQQKPGQAPRGLIGGTKFLAPGTPARFSGSLLGGKAALTLSGVQPEDEAEYYCVLWYSNRWVFGGGTKLTVLGGGGGTDKTHTCPPCPAPEAAGGPSVFLFPPKPKDTLMISRTPEVTCVVVDVSHEDPEVKFNWYVDGVEVHNAKTKPREEQYNSTYRVVSVLTVLHQDWLNGKEYKCKVSNKALPAPIEKTISKAKGQPREPEVATFPPSRDELTKNQVTLVCLVTGFYPSDIAVEWESNGQPENNYKTDPPLLESQGSFALSSRLRVDKSRWQQGNVFSCSVMHEALHNHYTQKSLSLSPGK

SEQ ID NO: 172 - protein, 448 aa, Artificial Sequence
  SEQ ID NO: 172 - BEAT OX40/CD3 antibody FAB heavy chain (OX40 arm with humanized anti-human OX40 VH domain from WO2013/008171)
QVTLKESGPALVKPTQTLTLTCSFSGFSLSTSGMGVGWIRQPPGKALEWIAHIWWDDDKYYNTALKTRLTISKDTSKNQVVLTMTNMDPVDTATYYCARIDWDGFAYWGQGTLVTVSSASTKGPSVFPLAPSSKSTSGGTAALGCLVKDYFPEPVTVSWNSGALTSGVHTFPAVLQSSGLYSLSSVVTVPSSSLGTQTYICNVNHKPSNTKVDKKVEPKSCDKTHTCPPCPAPEAAGGPSVFLFPPKPKDTLMISRTPEVTCVVVDVSHEDPEVKFNWYVDGVEVHNAKTKPREEQYNSTYRVVSVLTVLHQDWLNGKEYKCKVSNKALPAPIEKTISKAKGQPREPAVYTLPPSRDELTKNQVKLVCLVTGFYPSDIAVEWESNGQPENNYYTTPPVLDSDGSFSLVSWLNVDKSRWQQGNVFSCSVMHEALHNHYTQKSLSLSPGK

SEQ ID NO: 173 - protein, 213 aa, Artificial Sequence
  SEQ ID NO: 173 - BEAT OX40/CD3 antibody FAB light chain (OX40 arm with humanized anti-human OX40 VL domain from WO2013/008171)
EIVLTQSPATLSLSPGERATLSCRASSSVSYMHWYQQKPGQAPRPWIYATSNRATGIPARFSGSGSGTDYTLTISSLEPEDFAVYYCQQWSSNPWTFGQGTKVEIKRTVAAPSVFIFPPSDEQLKSGTASVVCLLNNFYPREAKVQWKVDNALQSGNSQESVTEQDSKDSTYSLSSTLTLSKADYEKHKVYACEVTHQGLSSPVTKSFNRGEC

SEQ ID NO: 174 - protein, 449 aa, Artificial Sequence
  SEQ ID NO: 174 - BEAT EGFR/CD3 antibody FAB heavy chain (EGFR arm with mouse Erbitux VH domain)
QVQLKQSGPGLVQPSQSLSITCTVSGFSLTNYGVHWVRQSPGKGLEWLGVIWSGGNTDYNTPFTSRLSINKDNSKSQVFFKMNSLQSNDTAIYYCARALTYYDYEFAYWGQGTLVTVSAASTKGPSVFPLAPSSKSTSGGTAALGCLVKDYFPEPVTVSWNSGALTSGVHTFPAVLQSSGLYSLSSVVTVPSSSLGTQTYICNVNHKPSNTKVDKKVEPKSCDKTHTCPPCPAPEAAGGPSVFLFPPKPKDTLMISRTPEVTCVVVDVSHEDPEVKFNWYVDGVEVHNAKTKPREEQYNSTYRVVSVLTVLHQDWLNGKEYKCKVSNKALPAPIEKTISKAKGQPREPAVYTLPPSRDELTKNQVKLVCLVTGFYPSDIAVEWESNGQPENNYYTTPPVLDSDGSFSLVSWLNVDKSRWQQGNVFSCSVMHEALHNHYTQKSLSLSPGK

SEQ ID NO: 175 - protein, 214 aa, Artificial Sequence
  SEQ ID NO: 175 - BEAT EGFR/CD3 antibody FAB light chain (EGFR arm with mouse Erbitux VL domain)
DILLTQSPVILSVSPGERVSFSCRASQSIGTNIHWYQQRTNGSPRLLIKYASESISGIPSRFSGSGSGTDFTLSINSVESEDIADYYCQQNNNWPTTFGAGTKLELKRTVAAPSVFIFPPSDEQLKSGTASVVCLLNNFYPREAKVQWKVDNALQSGNSQESVTEQDSKDSTYSLSSTLTLSKADYEKHKVYACEVTHQGLSSPVTKSFNRGEC

SEQ ID NO: 176 - protein, 449 aa, Artificial Sequence
  SEQ ID NO: 176 - BEAT CD38-HB7bestfit/CD3(SP34)antibody FAB heavy chain (CD38 arm - humanized HB-7 best-fit)
QVQLQESGPGLVKPSETLSLTCTVSGFSLISYGVHWVRQPPGKGLEWLGVIWRGGSTDYNAAFMSRLTISKDNSKNQVSLKLSSVTAADTAVYFCAKTLITTGYAMDYWGQGTLVTVSSASTKGPSVFPLAPSSKSTSGGTAALGCLVKDYFPEPVTVSWNSGALTSGVHTFPAVLQSSGLYSLSSVVTVPSSSLGTQTYICNVNHKPSNTKVDKKVEPKSCDKTHTCPPCPAPEAAGGPSVFLFPPKPKDTLMISRTPEVTCVVVDVSHEDPEVQFKWYVDGVEVHNAKTKPREEQYNSTFRVVSVLTVLHQDWLNGKEYKCKVSNKALPAPIEKTISKTKGQPREPAVYTLPPSREEMTKNQVKLVCLVTGFYPSDIAVEWESSGQPENNYYTTPPMLDSDGSFSLVSWLNVDKSRWQQGNIFSCSVMHEALHNRFTQKSLSLSPGK

SEQ ID NO: 177 - protein, 482 aa, Artificial Sequence; identical to SEQ ID NO: 171
  SEQ ID NO: 177 - BEST CD38-HB7bestfit/CD3(SP34) antibody scFv heavy chain (CD3 arm - humanized SP34 VH/VL domains from WO2008/119565)

SEQ ID NO: 178 - protein, 451 aa, Artificial Sequence
  SEQ ID NO: 178 - BEAT CD38-9G7bestfit/CD3(SP34)antibody FAB heavy chain (CD38 arm - humanized 9G7 best-fit VH)
QVTLKESGPTLVKPTQTLTLTCTFSGLSLSTSGKGVGWIRQPPGKALEWLAHIWWDDDKRYNPALKSRLTITKDTSKNQVVLTMTNMDPVDTATYYCARIELGRSYVMDYWGQGTLVTVSSASTKGPSVFPLAPSSKSTSGGTAALGCLVKDYFPEPVTVSWNSGALTSGVHTFPAVLQSSGLYSLSSVVTVPSSSLGTQTYICNVNHKPSNTKVDKKVEPKSCDKTHTCPPCPAPEAAGGPSVFLFPPKPKDTLMISRTPEVTCVVVDVSHEDPEVQFKWYVDGVEVHNAKTKPREEQYNSTFRVVSVLTVLHQDWLNGKEYKCKVSNKALPAPIEKTISKTKGQPREPAVYTLPPSREEMTKNQVKLVCLVTGFYPSDIAVEWESSGQPENNYYTTPPMLDSDGSFSLVSWLNVDKSRWQQGNIFSCSVMHEALHNRFTQKSLSLSPGK

SEQ ID NO: 179 - protein, 482 aa, Artificial Sequence
  SEQ ID NO: 179 - BEAT CD38-9G7bestfit/CD3(SP34-Kappa2) antibody scFv heavy chain (CD3 arm - humanized SP34 VH5/VL32)v
  misc_feature (213)..(213): Xaa can be any naturally occurring amino acid
EVQLVESGGGLVQPGGSLRLSCAASGFTFNTYAMNWVRQAPGKGLEWVARIRSKYNNYATYYADSVKGRFTISRDDSKNTLYLQMNSLRAEDTAVYYCVRHGNFGNSYVSWFAYWGQGTTVTVSSGGGGSGGGGSGGGGSEIVVTQSPATLSVSPGERATLSCRSSTGAVTTSNYANWVQEKPGQAFRGLIGGANKRAPGVPARFSGSLSGDXATLTISSLQSEDFAVYYCALWYSNLWVFGQGTKLEIKGGGGTDKTHTCPPCPAPEAAGGPSVFLFPPKPKDTLMISRTPEVTCVVVDVSHEDPEVKFNWYVDGVEVHNAKTKPREEQYNSTYRVVSVLTVLHQDWLNGKEYKCKVSNKALPAPIEKTISKAKGQPREPEVATFPPSRDELTKNQVTLVCLVTGFYPSDIAVEWESNGQPENNYKTDPPLLESQGSFALSSRLRVDKSRWQQGNVFSCSVMHEALHNHYTQKSLSLSPGK

SEQ ID NO: 180 - protein, 451 aa, Artificial Sequence
  SEQ ID NO: 180 - BEAT CD20/CD3 antibody FAB heavy chain
QVQLQQPGAELVKPGASVKMSCKASGYTFTSYNMHWVKQTPGRGLEWIGAIYPGNGDTSYNQKFKGKATLTADKSSSTAYMQLSSLTSEDSAVYYCARSTYYGGDWYFNVWGAGTTVTVSAASTKGPSVFPLAPSSKSTSGGTAALGCLVKDYFPEPVTVSWNSGALTSGVHTFPAVLQSSGLYSLSSVVTVPSSSLGTQTYICNVNHKPSNTKVDKKVEPKSCDKTHTCPPCPAPEAAGGPSVFLFPPKPKDTLMISRTPEVTCVVVDVSHEDPEVQFKWYVDGVEVHNAKTKPREEQYNSTFRVVSVLTVLHQDWLNGKEYKCKVSNKALPAPIEKTISKTKGQPREPAVYTLPPSREEMTKNQVKLVCLVTGFYPSDIAVEWESSGQPENNYYTTPPMLDSDGSFSLVSWLNVDKSRWQQGNIFSCSVMHEALHNRFTQKSLSLSPGK

SEQ ID NO: 181 - protein, 215 aa, Artificial Sequence
  SEQ ID NO: 181 - BEAT CD20/CD3 antibody FAB light chain
QIVLSQSPAILSASPGEKVTMETTCRASSSVSYIHWFQQKPGSSPKPWIYATSNLASGVPVRFSGSGSGTSYSLTISRVEAEDAATYYCQQWTSNPPTFGGGTKLEIKRTVAAPSVFIFPPSDEQLKSGTASVVCLLNNFYPREAKVQWKVDNALQSGNSQESVTEQDSKDSTYSLSSTLTLSKADYEKHKVYACEVTHQGLSSPVTKSFNRGEC

SEQ ID NO: 182 - protein, 109 aa, Artificial Sequence
  SEQ ID NO: 182 - Humanized SP34 VH domain from WO2008/119565
QTVVTQEPSLTVSPGGTVTLTCGSSTGAVTSGNYPNWVQQKPGQAPRGLIGGTKFLAPGTPARFSGSLLGGKAALTLSGVQPEDEAEYYCVLWYSNRWVFGGGTKLTVL

SEQ ID NO: 183 - protein, 109 aa, Artificial Sequence; identical to SEQ ID NO: 182
  SEQ ID NO: 183 - Humanized SP34 VL domain from WO2008/119565

SEQ ID NO: 184 - protein, 94 aa, Artificial Sequence
  SEQ ID NO: 184 - Human CD3 gamma extracellular region
QSIKGNHLVKVYDYQEDGSVLLTCDAEAKNITWFKDGKMIGFLTEDKKKWNLGSNAKDPRGMYQCKGSQNKSKPLQVYYRMCQNCIELNAATIS

SEQ ID NO: 185 - protein, 104 aa, Artificial Sequence
  SEQ ID NO: 185 - Human CD3 epsilon extracellular region
DGNEEMGGITQTPYKVSISGTTVILTCPQYPGSEILWQHNDKNIGGDEDDKNIGSDEDHLSLKEFSELEQSGYYVCYPRGSKPEDANFYLYLRARVCENCMEMD

SEQ ID NO: 186 - protein, 26 aa, Artificial Sequence
  SEQ ID NO: 186 - 26-residue peptide linker
GSADDAKKDAAKKDDAKKDDAKKDGS

SEQ ID NO: 187 - protein, 435 aa, Artificial Sequence
  SEQ ID NO: 187 - Human CD3 gamma-epsilon-Fc fusion protein
QSIKGNHLVKVYDYQEDGSVLLTCDAEAKNITWFKDGKMIGFLTEDKKKWNLGSNAKDPRGMYQCKGSQNKSKPLQVYYRMGSADDAKKDAAKKDDAKKDDAKKDGSQDGNEEMGGITQTPYKVSISGTTVILTCPQYPGSEILWQHNDKNIGGDEDDKNIGSDEDHLSLKEFSELEQSGYYVCYPRGSKPEDANFYLYLRARVGGGGTDKTHTCPPCPAPELLGGPSVFLFPPKPKDTLMISRTPEVTCVVVDVSHEDPEVKFNWYVDGVEVHNAKTKPREEQYNSTYRVVSVLTVLHQDWLNGKEYKCKVSNKALPAPIEKTISKAKGQPREPQVYTLPPSRDELTKNQVSLTCLVKGFYPSDIAVEWESNGQPENNYKTTPPVLDSDGSFFLYSKLTVDKSRWQQGNVFSCSVMHEALHNHYTQKSLSLSPG

SEQ ID NO: 188 - protein, 26 aa, Artificial Sequence
  SEQ ID NO: 188 - Human CD3 epsilon 1-26 amino acid sequence
QDGNEEMGGITQTPYKVSISGTTVIL

SEQ ID NO: 189 - protein, 26 aa, Artificial Sequence
  SEQ ID NO: 189 - Cynomolgus monkey CD3 epsilon 1-26 amino acid sequence
QDGNEEMGSITQTPYQVSISGTTVIL

SEQ ID NO: 190 - protein, 258 aa, Artificial Sequence
  SEQ ID NO: 190 - Human CD3 epsilon 1-26 Fc fusion
QDGNEEMGGITQTPYKVSISGTTVILGGGGTDKTHTCPPCPAPELLGGPSVFLFPPKPKDTLMISRTPEVTCVVVDVSHEDPEVKFNWYVDGVEVHNAKTKPREEQYNSTYRVVSVLTVLHQDWLNGKEYKCKVSNKALPAPIEKTISKAKGQPREPQVYTLPPSRDELTKNQVSLTCLVKGFYPSDIAVEWESNGQPENNYKTTPPVLDSDGSFFLYSKLTVDKSRWQQGNVFSCSVMHEALHNHYTQKSLSLSPGK

SEQ ID NO: 191 - protein, 258 aa, Artificial Sequence
  SEQ ID NO: 191 - Cynomolgus monkey CD3 epsilon 1-26 Fc fusion
QDGNEEMGSITQTPYQVSISGTTVILGGGGTDKTHTCPPCPAPELLGGPSVFLFPPKPKDTLMISRTPEVTCVVVDVSHEDPEVKFNWYVDGVEVHNAKTKPREEQYNSTYRVVSVLTVLHQDWLNGKEYKCKVSNKALPAPIEKTISKAKGQPREPQVYTLPPSRDELTKNQVSLTCLVKGFYPSDIAVEWESNGQPENNYKTTPPVLDSDGSFFLYSKLTVDKSRWQQGNVFSCSVMHEALHNHYTQKSLSLSPGK

SEQ ID NO: 192 - protein, 264 aa, Artificial Sequence
  SEQ ID NO: 192 - Human CD38 extracellular region fused to a polyhistine tag - amino acid sequence
VPRWRQQWSGPGTTKRFPETVLARCVKYTEIHPEMRHVDCQSVWDAFKGAFISKHPCNITEEDYQPLMKLGTQTVPCNKILLWSRIKDLAHQFTQVQRDMFTLEDTLLGYLADDLTWCGEFNTSKINYQSCPDWRKDCSNNPVSVFWKTVSRRFAEAACDVVHVMLNGSRSKIFDKNSTFGSVEVHNLQPEKVQTLEAWVIHGGREDSRDLCQDPTIKELESIISKRNIQFSCKNIYRPDKFLQCVKNPEDSSCTSEIHHHHHH

SEQ ID NO: 193 - protein, 264 aa, Artificial Sequence
  SEQ ID NO: 193 - Cynomolgus monkey CD38 extracellular region fused to a polyhistine tag - amino acid sequence
VPRWRQQWSGSGTTSRFPETVLARCVKYTEVHPEMRHVDCQSVWDAFKGAFISKYPCNITEEDYQPLVKLGTQTVPCNKTLLWSRIKDLAHQFTQVQRDMFTLEDMLLGYLADDLTWCGEFNTFEINYQSCPDWRKDCSNNPVSVFWKTVSRRFAETACGVVHVMLNGSRSKIFDKNSTFGSVEVHNLQPEKVQALEAWVIHGGREDSRDLCQDPTIKELESIISKRNIRFFCKNIYRPDKFLQCVKNPEDSSCLSGIHHHHHH

SEQ ID NO: 194 - protein, 8 aa, Artificial Sequence
  SEQ ID NO: 194 - Mouse anti- human CD3 epsilon OKT3 CDR H1
GYTFTRYT

SEQ ID NO: 195 - protein, 8 aa, Artificial Sequence
  SEQ ID NO: 195 - Mouse anti- human CD3 epsilon OKT3 CDR H2
INPSRGYT

SEQ ID NO: 196 - protein, 12 aa, Artificial Sequence
  SEQ ID NO: 196 - Mouse anti- human CD3 epsilon OKT3 CDR H3
ARYYDDHYCLDY

SEQ ID NO: 197 - protein, 5 aa, Artificial Sequence
  SEQ ID NO: 197 - Mouse anti- human CD3 epsilon OKT3 CDR L1
SSVSY

SEQ ID NO: 198 - protein, 3 aa, Artificial Sequence
  SEQ ID NO: 198 - Mouse anti- human CD3 epsilon OKT3 CDR L2
DTS

SEQ ID NO: 199 - protein, 9 aa, Artificial Sequence
  SEQ ID NO: 199 - Mouse anti- human CD3 epsilon OKT3 CDR L3
QQWSSNPPT

SEQ ID NO: 200 - protein, 8 aa, Artificial Sequence
  SEQ ID NO: 200 - Mouse anti- human CD3 epsilon SP34 CDR H1
GFTFNTYA

SEQ ID NO: 201 - protein, 10 aa, Artificial Sequence
  SEQ ID NO: 201 - Mouse anti- human CD3 epsilon SP34 CDR H2
IRSKYNNYAT

SEQ ID NO: 202 - protein, 16 aa, Artificial Sequence
  SEQ ID NO: 202 - Mouse anti- human CD3 epsilon SP34 CDR H3
VRHGNFGNSYVSWFAY

SEQ ID NO: 203 - protein, 9 aa, Artificial Sequence
  SEQ ID NO: 203 - Mouse anti- human CD3 epsilon SP34 CDR L1
TGAVTTSNY

SEQ ID NO: 204 - protein, 3 aa, Artificial Sequence
  SEQ ID NO: 204 - Mouse anti- human CD3 epsilon SP34 CDR L2
GTN

SEQ ID NO: 205 - protein, 9 aa, Artificial Sequence
  SEQ ID NO: 205 - Mouse anti- human CD3 epsilon SP34 CDR L3
ALWYSNLWV

SEQ ID NO: 206 - protein, 8 aa, Artificial Sequence
  SEQ ID NO: 206 - Herceptin (trastuzumab)CDR H1
GFNIKDTY

SEQ ID NO: 207 - protein, 8 aa, Artificial Sequence
  SEQ ID NO: 207 - Herceptin (trastuzumab) CDR H2
IYPTNGYT

SEQ ID NO: 208 - protein, 13 aa, Artificial Sequence
  SEQ ID NO: 208 - Herceptin (trastuzumab) CDR H3
SRWGGDGFYAMDY

SEQ ID NO: 209 - protein, 6 aa, Artificial Sequence
  SEQ ID NO: 209 - Herceptin (trastuzumab) CDR L1
QDVNTA

SEQ ID NO: 210 - protein, 3 aa, Artificial Sequence
  SEQ ID NO: 210 - Herceptin (trastuzumab) CDR L2
SAS

SEQ ID NO: 211 - protein, 9 aa, Artificial Sequence
  SEQ ID NO: 211 - Herceptin (trastuzumab) CDR L3
QQHYTTPPT

SEQ ID NO: 212 - protein, 8 aa, Artificial Sequence
  SEQ ID NO: 212 - Mouse anti- human CD38 HB-7 CDR H1
GFSLISYG

SEQ ID NO: 213 - protein, 7 aa, Artificial Sequence
  SEQ ID NO: 213 - Mouse anti- human CD38 HB-7 CDR H2
IWRGGST

SEQ ID NO: 214 - protein, 13 aa, Artificial Sequence
  SEQ ID NO: 214 - Mouse anti- human CD38 HB-7 CDR H3
AKTLITTGYAMDY

SEQ ID NO: 215 - protein, 6 aa, Artificial Sequence
  SEQ ID NO: 215 - Mouse anti- human CD38 HB-7 CDR L1
EDIYNR

SEQ ID NO: 216 - protein, 3 aa, Artificial Sequence
  SEQ ID NO: 216 - Mouse anti- human CD38 HB-7 CDR L2
GAT

SEQ ID NO: 217 - protein, 8 aa, Artificial Sequence
  SEQ ID NO: 217 - Mouse anti- human CD38 HB-7 CDR L3
QQYWSTPT

SEQ ID NO: 218 - protein, 8 aa, Artificial Sequence
  SEQ ID NO: 218 - Mouse anti- human CD38 OKT10 CDR H1
GFDFSRSW

SEQ ID NO: 219 - protein, 9 aa, Artificial Sequence
  SEQ ID NO: 219 - Mouse anti- human CD38 OKT10 CDR H2
INPDSSTIV

SEQ ID NO: 220 - protein, 9 aa, Artificial Sequence
  SEQ ID NO: 220 - Mouse anti- human CD38 OKT10 CDR H3
ARYGNWFPY

SEQ ID NO: 221 - protein, 6 aa, Artificial Sequence
  SEQ ID NO: 221 - Mouse anti- human CD38 OKT10 CDR L1
QNVDTN

SEQ ID NO: 222 - protein, 3 aa, Artificial Sequence
  SEQ ID NO: 222 - Mouse anti- human CD38 OKT10 CDR L2
SAS

SEQ ID NO: 223 - protein, 15 aa, Artificial Sequence
  SEQ ID NO: 223 - Mouse anti- human CD38 OKT10 CDR L3
QQYDSYPLTFGAGTK

SEQ ID NO: 224 - protein, 10 aa, Artificial Sequence
  SEQ ID NO: 224 - Mouse anti- human CD38 9G7 CDR H1
GLSLSTSGKG

SEQ ID NO: 225 - protein, 7 aa, Artificial Sequence
  SEQ ID NO: 225 - Mouse anti- human CD38 9G7 CDR H2
IWWDDDK

SEQ ID NO: 226 - protein, 13 aa, Artificial Sequence
  SEQ ID NO: 226 - Mouse anti- human CD38 9G7 CDR H3
ARIELGRSYVMDY

SEQ ID NO: 227 - protein, 6 aa, Artificial Sequence
  SEQ ID NO: 227 - Mouse anti- human CD38 9G7 CDR L1
QDVITS

SEQ ID NO: 228 - protein, 3 aa, Artificial Sequence
  SEQ ID NO: 228 - Mouse anti- human CD38 9G7 CDR L2
SAS

SEQ ID NO: 229 - protein, 9 aa, Artificial Sequence
  SEQ ID NO: 229 - Mouse anti- human CD38 9G7 CDR L3
QQHYTIPLT

SEQ ID NO: 230 - protein, 8 aa, Artificial Sequence
  SEQ ID NO: 230 - Human anti- human CD38 767 CDR H1
GFTFSSYW

SEQ ID NO: 231 - protein, 8 aa, Artificial Sequence
  SEQ ID NO: 231 - Human anti- human CD38767 CDR H2
IKQDGSEK

SEQ ID NO: 232 - protein, 11 aa, Artificial Sequence
  SEQ ID NO: 232 - Human anti- human CD38767 CDR H3
AREGRTGYFDY

SEQ ID NO: 233 - protein, 8 aa, Artificial Sequence
  SEQ ID NO: 233 - Human anti- human CD38767 CDR L1
TSNIGTNY

SEQ ID NO: 234 - protein, 3 aa, Artificial Sequence
  SEQ ID NO: 234 - Human anti- human CD38767 CDR L2
RND

SEQ ID NO: 235 - protein, 12 aa, Artificial Sequence
  SEQ ID NO: 235 - Human anti- human CD38767 CDR L3
AAWDDSRSGVYA

SEQ ID NO: 236 - protein, 10 aa, Artificial Sequence
  SEQ ID NO: 236 - Mouse anti-human OX40 CDR H1 from WO2013/008171
GFSLSTSGMG

SEQ ID NO: 237 - protein, 7 aa, Artificial Sequence
  SEQ ID NO: 237 - Mouse anti-human OX40 CDR H2 from WO2013/008171
IWWDDDK

SEQ ID NO: 238 - protein, 10 aa, Artificial Sequence
  SEQ ID NO: 238 - Mouse anti-human OX40 CDR H3 from WO2013/008171
ARIDWDGFAY

SEQ ID NO: 239 - protein, 5 aa, Artificial Sequence
  SEQ ID NO: 239 - Mouse anti-human OX40 CDR L1 from WO2013/008171
SSVSY

SEQ ID NO: 240 - protein, 3 aa, Artificial Sequence
  SEQ ID NO: 240 - Mouse anti-human OX40 CDR L2 from WO2013/008171
ATS

SEQ ID NO: 241 - protein, 9 aa, Artificial Sequence
  SEQ ID NO: 241 - Mouse anti-human OX40 CDR L3 from WO2013/008171
QQWSSNPWT

SEQ ID NO: 242 - protein, 8 aa, Artificial Sequence
  SEQ ID NO: 242 - Rituxan (rituximab) CDR H1
GYTFTSYN

SEQ ID NO: 243 - protein, 8 aa, Artificial Sequence
  SEQ ID NO: 243 - Rituxan (rituximab) CDR H2
IYPGNGDT

SEQ ID NO: 244 - protein, 14 aa, Artificial Sequence
  SEQ ID NO: 244 - Rituxan (rituximab) CDR H3
ARSTYYGGDWYFNV

SEQ ID NO: 245 - protein, 7 aa, Artificial Sequence
  SEQ ID NO: 245 - Rituxan (rituximab) CDR L1
ASSSVSY

SEQ ID NO: 246 - protein, 3 aa, Artificial Sequence
  SEQ ID NO: 246 - Rituxan (rituximab) CDR L2
ATS

SEQ ID NO: 247 - protein, 9 aa, Artificial Sequence
  SEQ ID NO: 247 - Rituxan (rituximab) CDR L3
QQWTSNPPT

SEQ ID NO: 248 - protein, 8 aa, Artificial Sequence
  SEQ ID NO: 248 - Erbitux (cetuximab) CDR H1
GFSLTNYG

SEQ ID NO: 249 - protein, 7 aa, Artificial Sequence
  SEQ ID NO: 249 - Erbitux (cetuximab) CDR H2
IWSGGNT

SEQ ID NO: 250 - protein, 13 aa, Artificial Sequence
  SEQ ID NO: 250 - Erbitux (cetuximab) CDR H3
ARALTYYDYEFAY

SEQ ID NO: 251 - protein, 6 aa, Artificial Sequence
  SEQ ID NO: 251 - Erbitux (cetuximab) CDR L1
QSIGTN

SEQ ID NO: 252 - protein, 3 aa, Artificial Sequence
  SEQ ID NO: 252 - Erbitux (cetuximab) CDR L2
YAS

SEQ ID NO: 253 - protein, 9 aa, Artificial Sequence
  SEQ ID NO: 253 - Erbitux (cetuximab) CDR L3
QQNNNWPTT

SEQ ID NO: 254 - protein, 10 aa, Artificial Sequence
  SEQ ID NO: 254 - Vectibix (panitumumab) CDR H1
GGSVSSGDYY

SEQ ID NO: 255 - protein, 7 aa, Artificial Sequence
  SEQ ID NO: 255 - Vectibix (panitumumab) CDR H2
IYYSGNT

SEQ ID NO: 256 - protein, 11 aa, Artificial Sequence
  SEQ ID NO: 256 - Vectibix (panitumumab) CDR H3
VRDRVTGAFDI

SEQ ID NO: 257 - protein, 6 aa, Artificial Sequence
  SEQ ID NO: 257 - Vectibix (panitumumab) CDR L1
QDISNY

SEQ ID NO: 258 - protein, 3 aa, Artificial Sequence
  SEQ ID NO: 258 - Vectibix (panitumumab) CDR L2
DAS

SEQ ID NO: 259 - protein, 9 aa, Artificial Sequence
  SEQ ID NO: 259 - Vectibix (panitumumab) CDR L3
QHFDHLPLA

SEQ ID NO: 260 - protein, 8 aa, Artificial Sequence
  SEQ ID NO: 260 - Mouse anti-human CD19 CDR H1 from WO2010/095031
GVSLPDYG

SEQ ID NO: 261 - protein, 7 aa, Artificial Sequence
  SEQ ID NO: 261 - Mouse anti-human CD19 CDR H2 from WO2010/095031
IWGSETT

SEQ ID NO: 262 - protein, 14 aa, Artificial Sequence
  SEQ ID NO: 262 - Mouse anti-human CD19 CDR H3 from WO2010/095031
AKHYYYGGSYAMDY

SEQ ID NO: 263 - protein, 6 aa, Artificial Sequence
  SEQ ID NO: 263 - Mouse anti-human CD19 CDR L1 from WO2010/095031
QDISKY

SEQ ID NO: 264 - protein, 3 aa, Artificial Sequence
  SEQ ID NO: 264 - Mouse anti-human CD19 CDR L2 from WO2010/095031
HTS

SEQ ID NO: 265 - protein, 9 aa, Artificial Sequence
  SEQ ID NO: 265 - Mouse anti-human CD19 CDR L3 from WO2010/095031
QQGATLPYT

SEQ ID NO: 266 - protein, 8 aa, Artificial Sequence
  SEQ ID NO: 266 - Bsw17 CDR H1
GFTFSSYA

SEQ ID NO: 267 - protein, 7 aa, Artificial Sequence
  SEQ ID NO: 267 - Bsw17 CDR H2
ISSGNII

SEQ ID NO: 268 - protein, 12 aa, Artificial Sequence
  SEQ ID NO: 268 - Bsw17 CDR H3
TRGRSTYGGFDH

SEQ ID NO: 269 - protein, 5 aa, Artificial Sequence
  SEQ ID NO: 269 - Bsw17 CDR L1
SSVTF

SEQ ID NO: 270 - protein, 3 aa, Artificial Sequence
  SEQ ID NO: 270 - Bsw17 CDR L2
DTS

SEQ ID NO: 271 - protein, 9 aa, Artificial Sequence
  SEQ ID NO: 271 - Bsw17 CDR L3
QHWSGNPLT

SEQ ID NO: 272 - protein, 9 aa, Artificial Sequence
  SEQ ID NO: 272 - Omalizumab CDR H1
GYSITSGYS

SEQ ID NO: 273 - protein, 7 aa, Artificial Sequence
  SEQ ID NO: 273 - Omalizumab CDR H2
ITYDGST

SEQ ID NO: 274 - protein, 14 aa, Artificial Sequence
  SEQ ID NO: 274 - Omalizumab CDR H3
ARGSHYFGHWHFAV

SEQ ID NO: 275 - protein, 10 aa, Artificial Sequence
  SEQ ID NO: 275 - Omalizumab CDR L1
QSVDYDGDSY

SEQ ID NO: 276 - protein, 3 aa, Artificial Sequence
  SEQ ID NO: 276 - Omalizumab CDR L2
AAS

SEQ ID NO: 277 - protein, 9 aa, Artificial Sequence
  SEQ ID NO: 277 - Omalizumab CDR L3
QQSHEDPYT

SEQ ID NO: 278 - protein, 118 aa, Artificial Sequence
  SEQ ID NO: 278 - Humanized anti-OX40/mingraft VH domain
EVQLVESGGGLVQPGGSLRLSCAASGFSLSTSGMGMSWVRQAPGKGLEWVSAIWWDDDKYYADSVKGRFTISRDNSKNTLYLQMNSLRAEDTAVYYCARIDWDGFAYWGQGTLVTVSS

SEQ ID NO: 279 - protein, 118 aa, Artificial Sequence
  SEQ ID NO: 279 - Humanized anti-OX40/maxgraft VH domain
EVQLVESGGGLVQPGGSLRLSCAFSGFSLSTSGMGVGWIRQAPGKGLEWLAHIWWDDDKYYNTALKSGLTISKDTSKNTVYLQMNSLRAEDTAVYYCARIDWDGFAYWGQGTLVTVSS

SEQ ID NO: 280 - protein, 106 aa, Artificial Sequence
  SEQ ID NO: 280 - Humanized anti-OX40/mingraft VL domain
DIQMTQSPSSLSASVGDRVTITCRASSSVSYLNWYQQKPGKAPKLLIYATSSLQSGVPSRFSGSGSGTDFTLTISSLQPEDFATYYCQQWSSNPWTFGQGTKVEIK

SEQ ID NO: 281 - protein, 106 aa, Artificial Sequence
  SEQ ID NO: 281 - Humanized anti-OX40/maxgraft VL domain
DIQLTQSPSSLSASVGDRVTITCRASSSVSYMHWYQQKPGKAPKPWIYATSNLASGVPSRFSGSGSGTDYTLTISSLQPEDFATYYCQQWSSNPWTFGQGTKVEIK

SEQ ID NO: 282 - protein, 121 aa, Artificial Sequence
  SEQ ID NO: 282 - Humanized Rituximab/mingraft VH domain
EVQLVESGGGLVQPGGSLRLSCAASGYTFTSYNMSWVRQAPGKGLEWVSAIYPGNGDTYYADSVKGRFTISRDNSKNTLYLQMNSLRAEDTAVYYCARSTYYGGDWYFNVWGQGTLVTVSS

SEQ ID NO: 283 - protein, 121 aa, Artificial Sequence
  SEQ ID NO: 283 - Humanized Rituximab/maxgraft VH domain
EVQLVESGGGLVQPGGSLRLSCAASGYTFTSYNMSWVRQAPGKGLEWIGAIYPGNGDTYYADSVKGRATLSADKSKNTAYLQMNSLRAEDTAVYYCARSTYYGGDWYFNVWGQGTLVTVSS

SEQ ID NO: 284 - protein, 108 aa, Artificial Sequence
  SEQ ID NO: 284 - Humanized Rituximab/mingraft VL domain
DIQMTQSPSSLSASVGDRVTITCRASASSSVSYLNWYQQKPGKAPKLLIYATSSLQSGVPSRFSGSGSGTDFTLTISSLQPEDFATYYCQQWTSNPPTFGQGTKVEIK

SEQ ID NO: 285 - protein, 108 aa, Artificial Sequence
  SEQ ID NO: 285 - Humanized Rituximab/maxgraft VL domain
DIQLTQSPSSLSASVGDRVTITCRLSASSSVSYLNWFQQKPGKAPKPWIYATSSLQSGVPSRFSGSGSGTDYTLTISSLQPEDFATYYCQQWTSNPPTFGQGTKVEIK

SEQ ID NO: 286 - protein, 119 aa, Artificial Sequence
  SEQ ID NO: 286 - Humanized Erbitux/mingraft VH domain
EVQLVESGGGLVQPGGSLRLSCAASGFSLTNYGMSWVRQAPGKGLEWVSAIWSGGNTYYADSVKGRFTISRDNSKNTLYLQMNSLRAEDTAVYYCARALTYYDYEFAYWGQGTLVTVSS

SEQ ID NO: 287 - protein, 119 aa, Artificial Sequence
  SEQ ID NO: 287 - Humanized Erbitux/maxgraft VH domain
EVQLVESGGGLVQPGGSLRLSCAASGFSLTNYGVHWVRQAPGKGLEWLGAIWSGGNTDYNTPFTGRLTISKDNSKNTLYLQMNSLRAEDTAVYYCARALTYYDYEFAYWGQGTLVTVSS

SEQ ID NO: 288 - protein, 107 aa, Artificial Sequence
  SEQ ID NO: 288 - Humanized Erbitux/mingraft VL domain
DIQMTQSPSSLSASVGDRVTITCRASQSIGTNLNWYQQKPGKAPKLLIYYASSLQSGVPSRFSGSGSGTDFTLTISSLQPEDFATYYCQQNNNWPTTFGQGTKVEIK

SEQ ID NO: 289 - protein, 107 aa, Artificial Sequence
  SEQ ID NO: 289 - Humanized Erbitux/maxgraft VL domain
DIQLTQSPSSLSASVGDRVTITCRASQSIGTNIHWYQQKPGKAPKLLIKYASESISGVPSRFSGSGSGTDFTLTISSLQPEDFATYYCQQNNNWPTTFGQGTKVEIK

SEQ ID NO: 290 - protein, 119 aa, Artificial Sequence [sequence omitted]

SEQ ID NO: 291 - protein, 107 aa, Artificial Sequence [sequence omitted]

SEQ ID NO: 292 - protein, 119 aa, Artificial Sequence
  SEQ ID NO: 292 - Humanized Vectibix/mingraft VH domain
EVQLVESGGGLVQPGGSLRLSCAASGGSVSSGDYYMSWVRQAPGKGLEWVSAIYYSGNTYYADSVKGRFTISRDNSKNTLYLQMNSLRAEDTAVYYCVRDRVTGAFDIWGQGTLVTVSS

SEQ ID NO: 293 - protein, 119 aa, Artificial Sequence
  SEQ ID NO: 293 - Humanized Vectibix/maxgraft VH domain
EVQLVESGGGLVQPGGSLRLSCAVSGGSVSSGDYYMSWVRQAPGKGLEWIGAIYYSGNTYYADSVKGRLTISIDTSKNTFYLQMNSLRAEDTAVYYCVRDRVTGAFDIWGQGTLVTVSS

SEQ ID NO: 294 - protein, 107 aa, Artificial Sequence
  SEQ ID NO: 294 - Humanized Vectibix/mingraft VL domain
DIQMTQSPSSLSASVGDRVTITCRASQDISNYLNWYQQKPGKAPKLLIYDASSLQSGVPSRFSGSGSGTDFTLTISSLQPEDFATYYCQHFDHLPLAFGQGTKVEIK

SEQ ID NO: 295 - protein, 107 aa, Artificial Sequence [sequence omitted]

SEQ ID NO: 296 - protein, 120 aa, Artificial Sequence
  SEQ ID NO: 296 - anti-human CD19 VH domain from WO2010/095031
QVQLVQSGGGVVQPGRSLRLSCAASGVSLPDYGVSWVRQAPGKGLEWVAVIWGSETTYYNSALKSRFTISRDNSKNTLYLQMNSLRAEDTAVYYCAKHYYYGGSYAMDYWGQGTLVTVSS

SEQ ID NO: 297 - protein, 107 aa, Artificial Sequence
  SEQ ID NO: 297 - anti-human CD19 VL domain from WO2010/095031
DIQMTQSPSSLSASVGDRVTITCRASQDISKYLNWYQQKPGKAIKLLIYHTSRLHSGVPSRFSGSGSGTDFTLTISSLQPEDFATYYCQQGATLPYTFGPGTKVDIK

SEQ ID NO: 298 - protein, 121 aa, Artificial Sequence
  SEQ ID NO: 298 - Omalizumab VH domain
EVQLVESGGGLVQPGGSLRLSCAVSGYSITSGYSWNWIRQAPGKGLEWVASITYDGSTNYADSVKGRFTISRDDSKNTFYLQMNSLRAEDTAVYYCARGSHYFGHWHFAVWGQGTLVTVSS

SEQ ID NO: 299 - protein, 111 aa, Artificial Sequence [sequence omitted]

SEQ ID NO: 300 - protein, 121 aa, Artificial Sequence; identical to SEQ ID NO: 298
  SEQ ID NO: 300 - Stabilized Omalizumab/maxgraft VH domain

SEQ ID NO: 301 - protein, 121 aa, Artificial Sequence
  SEQ ID NO: 301 - Stabilized Omalizumab/mingraft VH domain
EVQLVESGGGLVQPGGSLRLSCAASGYSITSGYSMSWVRQAPGKGLEWVSAITYDGSTYYADSVKGRFTISRDNSKNTLYLQMNSLRAEDTAVYYCARGSHYFGHWHFAVWGQGTLVTVSS

SEQ ID NO: 302 - protein, 111 aa, Artificial Sequence [sequence omitted]

SEQ ID NO: 303 - protein, 111 aa, Artificial Sequence
  SEQ ID NO: 303 - Stabilized Omalizumab/mingraft VL domain
DIQMTQSPSSLSASVGDRVTITCRASQSVDYDGDSYLNWYQQKPGKAPKLLIYAASSLQSGVPSRFSGSGSGTDFTLTISSLQPEDFATYYCQQSHEDPYTFGQGTKVEIK

SEQ ID NO: 304 - protein, 118 aa, Artificial Sequence
  SEQ ID NO: 304 - Bsw17 mouse VH domain
EVQLLESGGGFVKPGGSLKLSCVVSGFTFSSYAMSWVRQTPEKRLEWVASISSGNIIYYPDNVKGRFTISRDNVRNILYLQMSSLRSEDTAMYYCTRGRSTYGGFDHWGQGTTLTVSS

SEQ ID NO: 305 - protein, 106 aa, Artificial Sequence
  SEQ ID NO: 305 - Bsw17 mouse VL domain
ELVMTQSPAIMSASPGEKVTMTCSASSSVTFIHWYRQKSGTSPKGWIYDTSKLASGVPARFSGSGSGTSYSLTISTMEAEDAATYYCQHWSGNPLTFGTGTKLELK

SEQ ID NO: 306 - protein, 118 aa, Artificial Sequence
  SEQ ID NO: 306 - Humanized Bsw17/mingraft VH domain
EVQLVESGGGLVQPGGSLRLSCAASGFTFSSYAMSWVRQAPGKGLEWVSAISSGNIIYYADSVKGRFTISRDNSKNTLYLQMNSLRAEDTAVYYCTRGRSTYGGFDHWGQGTLVTVSS

SEQ ID NO: 307 - protein, 118 aa, Artificial Sequence
  SEQ ID NO: 307 - Humanized Bsw17/maxgraft VH domain
EVQLVESGGGLVKPGGSLRLSCAVSGFTFSSYAMSWVRQAPGKGLEWVASISSGNIIYYPDNVKGRFTISRDNAKNSLYLQMNSLRAEDTAVYYCTRGRSTYGGFDHWGQGTTVTVSS

SEQ ID NO: 308 - protein, 106 aa, Artificial Sequence
  SEQ ID NO: 308 - Humanized Bsw17/mingraft VL domain
DIQMTQSPSSLSASVGDRVTITCRASSSVTFLNWYQQKPGKAPKLLIYDTSSLQSGVPSRFSGSGSGTDFTLTISSLQPEDFATYYCQHWSGNPLTFGQGTKVEIK

SEQ ID NO: 309 - protein, 106 aa, Artificial Sequence
  SEQ ID NO: 309 - Humanized Bsw17/maxgraft VL domain
DLQMTQSPSSLSASVGDRVTITCSASSSVTFLNWYQQKPGKAPWLLIYDTSSLQSGVPSRFSGSGSGTDYTLTISSMQPEDFATYYCQHWSGNPLTFGQGTKVEIK

SEQ ID NO: 310 - protein, 449 aa, Artificial Sequence
  SEQ ID NO: 310 - BEAT HER2/CD3(SP34-Kappa2) antibody FAB heavy chain (anti-HER2 FAB arm with G65S substitution BT33 LALA)
EVQLVESGGGLVQPGGSLRLSCAASGFNIKDTYIHWVRQAPGKGLEWVARIYPTNGYTRYADSVKSRFTISADTSKNTAYLQMNSLRAEDTAVYYCSRWGGDGFYAMDYWGQGTLVTVSSASTKGPSVFPLAPSSKSTSGGTAALGCLVKDYFPEPVTVSWNSGALTSGVHTFPAVLQSSGLYSLSSVVTVPSSSLGTQTYICNVNHKPSNTKVDKKVEPKSCDKTHTCPPCPAPEAAGGPSVFLFPPKPKDTLMISRTPEVTCVVVDVSHEDPEVQFKWYVDGVEVHNAKTKPREEQYNSTFRVVSVLTVLHQDWLNGKEYKCKVSNKALPAPIEKTISKTKGQPREPAVYTLPPSREEMTKNQVKLVCLVTGFYPSDIAVEWESSGQPENNYYTTPPMLDSDGSFSLVSWLNVDKSRWQQGNIFSCSVMHEALHNRFTQKSLSLSPG

SEQ ID NO: 311 - protein, 481 aa, Artificial Sequence
  SEQ ID NO: 311 - BEAT antibody scFv heavy chain SP34-Kappa2(anti-CD3 epsilon arm - humanized SP34 VH5/VL32 BT11 LALA)
EVQLVESGGGLVQPGGSLRLSCAASGFTFNTYAMNWVRQAPGKGLEWVARIRSKYNNYATYYADSVKGRFTISRDDSKNTLYLQMNSLRAEDTAVYYCVRHGNFGNSYVSYFAYWGQGTTVTVSSGGGGSGGGGSGGGGSEIVVTQSPATLSVSPGERATLSCRSSTGAVTAANYANWVQEKPGQAFRGLIGGANKRAPGVPARFSGSLSGDEATLTISSLQSEDFAVYYCALFYSNLWVFGQGTKLEIKGGGGTDKTHTCPPCPAPEAAGGPSVFLFPPKPKDTLMISRTPEVTCVVVDVSHEDPEVKFNWYVDGVEVHNAKTKPREEQYNSTYRVVSVLTVLHQDWLNGKEYKCKVSNKALPAPIEKTISKAKGQPREPEVATFPPSRDELTKNQVTLVCLVTGFYPSDIAVEWESNGQPENNYKTDPPLLESQGSFALSSRLRVDKSRWQQGNVFSCSVMHEALHNHYTQKSLSLSPG

SEQ ID NO: 312 - protein, 450 aa, Artificial Sequence
  SEQ ID NO: 312 - BEAT CD38-9G7bestframwork/CD3(SP34-Kappa2) antibody FAB heavy chain (anti-CD38 FAB arm with G65S substitution BT33 LALA)
EVQLVESGGGLVQPGGSLRLSCAFSGLSLSTSGKGVGWIRQAPGKGLEWLAHIWWDDDKRYNPALKSRLTISKDTSKNTVYLQMNSLRAEDTAVYYCARIELGRSYVMDYWGQGTLVTVSSASTKGPSVFPLAPSSKSTSGGTAALGCLVKDYFPEPVTVSWNSGALTSGVHTFPAVLQSSGLYSLSSVVTVPSSSLGTQTYICNVNHKPSNTKVDKKVEPKSCDKTHTCPPCPAPEAAGGPSVFLFPPKPKDTLMISRTPEVTCVVVDVSHEDPEVQFKWYVDGVEVHNAKTKPREEQYNSTFRVVSVLTVLHQDWLNGKEYKCKVSNKALPAPIEKTISKTKGQPREPAVYTLPPSREEMTKNQVKLVCLVTGFYPSDIAVEWESSGQPENNYYTTPPMLDSDGSFSLVSWLNVDKSRWQQGNIFSCSVMHEALHNRFTQKSLSLSPG

SEQ ID NO: 313 - protein, 447 aa, Artificial Sequence
  SEQ ID NO: 313 - BEAT CD38-767/CD3(SP34-Kappa2) antibody FAB heavy chain (anti-CD38 FAB arm with G65S substitution BT33 LALA)
EVQLVESGGGLVQPGGSLRLSCAASGFTFSSYWMSWVRQAPGKGLEWVANIKQDGSEKYYVDSVKSRFTISRDNSKNTLYLQMNSLRAEDTAVYYCAREGRTGYFDYWGQGTLVTVSSASTKGPSVFPLAPSSKSTSGGTAALGCLVKDYFPEPVTVSWNSGALTSGVHTFPAVLQSSGLYSLSSVVTVPSSSLGTQTYICNVNHKPSNTKVDKKVEPKSCDKTHTCPPCPAPEAAGGPSVFLFPPKPKDTLMISRTPEVTCVVVDVSHEDPEVQFKWYVDGVEVHNAKTKPREEQYNSTFRVVSVLTVLHQDWLNGKEYKCKVSNKALPAPIEKTISKTKGQPREPAVYTLPPSREEMTKNQVKLVCLVTGFYPSDIAVEWESSGQPENNYYTTPPMLDSDGSFSLVSWLNVDKSRWQQGNIFSCSVMHEALHNRFTQKSLSLSPG

SEQ ID NO: 314 - protein, 447 aa, Artificial Sequence
  SEQ ID NO: 314 - BEAT OX40maxgraft/CD3(SP34-Kappa2) antibody FAB heavy chain (anti-OX40 maxgraft FAB arm with G65S substitution BT33 LALA)
EVQLVESGGGLVQPGGSLRLSCAFSGFSLSTSGMGVGWIRQAPGKGLEWLAHIWWDDDKYYNTALKSGLTISKDTSKNTVYLQMNSLRAEDTAVYYCARIDWDGFAYWGQGTLVTVSSASTKGPSVFPLAPSSKSTSGGTAALGCLVKDYFPEPVTVSWNSGALTSGVHTFPAVLQSSGLYSLSSVVTVPSSSLGTQTYICNVNHKPSNTKVDKKVEPKSCDKTHTCPPCPAPEAAGGPSVFLFPPKPKDTLMISRTPEVTCVVVDVSHEDPEVQFKWYVDGVEVHNAKTKPREEQYNSTFRVVSVLTVLHQDWLNGKEYKCKVSNKALPAPIEKTISKTKGQPREPAVYTLPPSREEMTKNQVKLVCLVTGFYPSDIAVEWESSGQPENNYYTTPPMLDSDGSFSLVSWLNVDKSRWQQGNIFSCSVMHEALHNRFTQKSLSLSPG

SEQ ID NO: 315 - protein, 213 aa, Artificial Sequence
  SEQ ID NO: 315 - BEAT OX40maxgraft/CD3(SP34-Kappa2) antibody FAB light chain (anti-OX40 maxgraft FAB arm LC)
DIQLTQSPSSLSASVGDRVTITCRASSSVSYMHWYQQKPGKAPKPWIYATSNLASGVPSRFSGSGSGTDYTLTISSLQPEDFATYYCQQWSSNPWTFGQGTKVEIKRTVAAPSVFIFPPSDEQLKSGTASVVCLLNNFYPREAKVQWKVDNALQSGNSQESVTEQDSKDSTYSLSSTLTLSKADYEKHKVYACEVTHQGLSSPVTKSFNRGEC

SEQ ID NO: 316 - protein, 447 aa, Artificial Sequence
  SEQ ID NO: 316 - BEAT OX40mingraft/CD3(SP34-Kappa2) antibody FAB heavy chain (anti-OX40 mingraft FAB arm with G65S substitution BT33 LALA)
EVQLVESGGGLVQPGGSLRLSCAASGFSLSTSGMGMSWVRQAPGKGLEWVSAIWWDDDKYYADSVKSRFTISRDNSKNTLYLQMNSLRAEDTAVYYCARIDWDGFAYWGQGTLVTVSSASTKGPSVFPLAPSSKSTSGGTAALGCLVKDYFPEPVTVSWNSGALTSGVHTFPAVLQSSGLYSLSSVVTVPSSSLGTQTYICNVNHKPSNTKVDKKVEPKSCDKTHTCPPCPAPEAAGGPSVFLFPPKPKDTLMISRTPEVTCVVVDVSHEDPEVQFKWYVDGVEVHNAKTKPREEQYNSTFRVVSVLTVLHQDWLNGKEYKCKVSNKALPAPIEKTISKTKGQPREPAVYTLPPSREEMTKNQVKLVCLVTGFYPSDIAVEWESSGQPENNYYTTPPMLDSDGSFSLVSWLNVDKSRWQQGNIFSCSVMHEALHNRFTQKSLSLSPG

SEQ ID NO: 317 - protein, 213 aa, Artificial Sequence
  SEQ ID NO: 317 - BEAT OX40mingraft/CD3(SP34-Kappa2) antibody FAB light chain (anti-OX40 mingraft FAB arm LC)
DIQMTQSPSSLSASVGDRVTITCRASSSVSYLNWYQQKPGKAPKLLIYATSSLQSGVPSRFSGSGSGTDFTLTISSLQPEDFATYYCQQWSSNPWTFGQGTKVEIKRTVAAPSVFIFPPSDEQLKSGTASVVCLLNNFYPREAKVQWKVDNALQSGNSQESVTEQDSKDSTYSLSSTLTLSKADYEKHKVYACEVTHQGLSSPVTKSFNRGEC

SEQ ID NO: 318 - protein, 450 aa, Artificial Sequence
  SEQ ID NO: 318 - BEAT CD20maxgraft/CD3(SP34-Kappa2) antibody FAB heavy chain (anti-CD20 maxgraft FAB arm with G65S substitution BT33 LALA)
EVQLVESGGGLVQPGGSLRLSCAASGYTFTSYNMSWVRQAPGKGLEWIGAIYPGNGDTYYADSVKSRATLSADKSKNTAYLQMNSLRAEDTAVYYCARSTYYGGDWYFNVWGQGTLVTVSSASTKGPSVFPLAPSSKSTSGGTAALGCLVKDYFPEPVTVSWNSGALTSGVHTFPAVLQSSGLYSLSSVVTVPSSSLGTQTYICNVNHKPSNTKVDKKVEPKSCDKTHTCPPCPAPEAAGGPSVFLFPPKPKDTLMISRTPEVTCVVVDVSHEDPEVQFKWYVDGVEVHNAKTKPREEQYNSTFRVVSVLTVLHQDWLNGKEYKCKVSNKALPAPIEKTISKTKGQPREPAVYTLPPSREEMTKNQVKLVCLVTGFYPSDIAVEWESSGQPENNYYTTPPMLDSDGSFSLVSWLNVDKSRWQQGNIFSCSVMHEALHNRFTQKSLSLSPG

SEQ ID NO: 319 - protein, 215 aa, Artificial Sequence
  SEQ ID NO: 319 - BEAT CD20maxgraft/CD3(SP34-Kappa2) antibody FAB light chain (anti-CD20 maxgraft FAB arm LC)
DIQLTQSPSSLSASVGDRVTITCRLSASSSVSYLNWFQQKPGKAPKPWIYATSSLQSGVPSRFSGSGSGTDYTLTISSLQPEDFATYYCQQWTSNPPTFGQGTKVEIKRTVAAPSVFIFPPSDEQLKSGTASVVCLLNNFYPREAKVQWKVDNALQSGNSQESVTEQDSKDSTYSLSSTLTLSKADYEKHKVYACEVTHQGLSSPVTKSFNRGEC

SEQ ID NO: 320 - protein, 450 aa, Artificial Sequence
  SEQ ID NO: 320 - BEAT CD20mingraft/CD3(SP34-Kappa2) antibody FAB heavy chain (anti-CD20 mingraft FAB arm with G65S substitution BT33 LALA)
EVQLVESGGGLVQPGGSLRLSCAASGYTFTSYNMSWVRQAPGKGLEWVSAIYPGNGDTYYADSVKSRFTISRDNSKNTLYLQMNSLRAEDTAVYYCARSTYYGGDWYFNVWGQGTLVTVSSASTKGPSVFPLAPSSKSTSGGTAALGCLVKDYFPEPVTVSWNSGALTSGVHTFPAVLQSSGLYSLSSVVTVPSSSLGTQTYICNVNHKPSNTKVDKKVEPKSCDKTHTCPPCPAPEAAGGPSVFLFPPKPKDTLMISRTPEVTCVVVDVSHEDPEVQFKWYVDGVEVHNAKTKPREEQYNSTFRVVSVLTVLHQDWLNGKEYKCKVSNKALPAPIEKTISKTKGQPREPAVYTLPPSREEMTKNQVKLVCLVTGFYPSDIAVEWESSGQPENNYYTTPPMLDSDGSFSLVSWLNVDKSRWQQGNIFSCSVMHEALHNRFTQKSLSLSPG

SEQ ID NO: 321 - protein, 215 aa, Artificial Sequence
  SEQ ID NO: 321 - BEAT CD20mingraft/CD3(SP34-Kappa2) antibody FAB light chain (anti-CD20 mingraft FAB arm LC)
DIQMTQSPSSLSASVGDRVTITCRASASSSVSYLNWYQQKPGKAPKLLIYATSSLQSGVPSRFSGSGSGTDFTLTISSLQPEDFATYYCQQWTSNPPTFGQGTKVEIKRTVAAPSVFIFPPSDEQLKSGTASVVCLLNNFYPREAKVQWKVDNALQSGNSQESVTEQDSKDSTYSLSSTLTLSKADYEKHKVYACEVTHQGLSSPVTKSFNRGEC

SEQ ID NO: 322 - protein, 448 aa, Artificial Sequence
  SEQ ID NO: 322 - BEAT EGFRcetux-maxgraft/CD3(SP34-Kappa2) antibody FAB heavy chain (anti-EGFR cetuximab maxgraft FAB arm with G65S substitution BT33 LALA)
EVQLVESGGGLVQPGGSLRLSCAASGFSLTNYGVHWVRQAPGKGLEWLGAIWSGGNTDYNTPFTSRLTISKDNSKNTLYLQMNSLRAEDTAVYYCARALTYYDYEFAYWGQGTLVTVSSASTKGPSVFPLAPSSKSTSGGTAALGCLVKDYFPEPVTVSWNSGALTSGVHTFPAVLQSSGLYSLSSVVTVPSSSLGTQTYICNVNHKPSNTKVDKKVEPKSCDKTHTCPPCPAPEAAGGPSVFLFPPKPKDTLMISRTPEVTCVVVDVSHEDPEVQFKWYVDGVEVHNAKTKPREEQYNSTFRVVSVLTVLHQDWLNGKEYKCKVSNKALPAPIEKTISKTKGQPREPAVYTLPPSREEMTKNQVKLVCLVTGFYPSDIAVEWESSGQPENNYYTTPPMLDSDGSFSLVSWLNVDKSRWQQGNIFSCSVMHEALHNRFTQKSLSLSPG

SEQ ID NO: 323 - protein, 214 aa, Artificial Sequence
  SEQ ID NO: 323 - BEAT EGFRcetux-maxgraft/CD3(SP34-Kappa2) antibody FAB light chain (anti-EGFR cetuximab maxgraft FAB arm)
DIQLTQSPSSLSASVGDRVTITCRASQSIGTNIHWYQQKPGKAPKLLIKYASESISGVPSRFSGSGSGTDFTLTISSLQPEDFATYYCQQNNNWPTTFGQGTKVEIKRTVAAPSVFIFPPSDEQLKSGTASVVCLLNNFYPREAKVQWKVDNALQSGNSQESVTEQDSKDSTYSLSSTLTLSKADYEKHKVYACEVTHQGLSSPVTKSFNRGEC

SEQ ID NO: 324 - protein, 448 aa, Artificial Sequence
  SEQ ID NO: 324 - BEAT EGFRcetux-mingraft/CD3(SP34-Kappa2) antibody FAB heavy chain (anti-EGFR cetuximab mingraft FAB arm with G65S substitution BT33 LALA)
EVQLVESGGGLVQPGGSLRLSCAASGFSLTNYGMSWVRQAPGKGLEWVSAIWSGGNTYYADSVKSRFTISRDNSKNTLYLQMNSLRAEDTAVYYCARALTYYDYEFAYWGQGTLVTVSSASTKGPSVFPLAPSSKSTSGGTAALGCLVKDYFPEPVTVSWNSGALTSGVHTFPAVLQSSGLYSLSSVVTVPSSSLGTQTYICNVNHKPSNTKVDKKVEPKSCDKTHTCPPCPAPEAAGGPSVFLFPPKPKDTLMISRTPEVTCVVVDVSHEDPEVQFKWYVDGVEVHNAKTKPREEQYNSTFRVVSVLTVLHQDWLNGKEYKCKVSNKALPAPIEKTISKTKGQPREPAVYTLPPSREEMTKNQVKLVCLVTGFYPSDIAVEWESSGQPENNYYTTPPMLDSDGSFSLVSWLNVDKSRWQQGNIFSCSVMHEALHNRFTQKSLSLSPG

SEQ ID NO: 325 - protein, 214 aa, Artificial Sequence
  SEQ ID NO: 325 - BEAT EGFRcetux-mingraft/CD3(SP34-Kappa2) antibody FAB light chain (anti-EGFR cetuximab mingraft FAB arm)
DIQMTQSPSSLSASVGDRVTITCRASQSIGTNLNWYQQKPGKAPKLLIYYASSLQSGVPSRFSGSGSGTDFTLTISSLQPEDFATYYCQQNNNWPTTFGQGTKVEIKRTVAAPSVFIFPPSDEQLKSGTASVVCLLNNFYPREAKVQWKVDNALQSGNSQESVTEQDSKDSTYSLSSTLTLSKADYEKHKVYACEVTHQGLSSPVTKSFNRGEC

SEQ ID NO: 326 - protein, 448 aa, Artificial Sequence
  SEQ ID NO: 326 - BEAT EGFRpani-maxgraft/CD3(SP34-Kappa2) antibody FAB heavy chain (anti-EGFR panitumumab maxgraft FAB arm with G65S substitution BT33 LALA)
EVQLVESGGGLVQPGGSLRLSCAVSGGSVSSGDYYMSWVRQAPGKGLEWIGAIYYSGNTYYADSVKSRLTISIDTSKNTFYLQMNSLRAEDTAVYYCVRDRVTGAFDIWGQGTLVTVSSASTKGPSVFPLAPSSKSTSGGTAALGCLVKDYFPEPVTVSWNSGALTSGVHTFPAVLQSSGLYSLSSVVTVPSSSLGTQTYICNVNHKPSNTKVDKKVEPKSCDKTHTCPPCPAPEAAGGPSVFLFPPKPKDTLMISRTPEVTCVVVDVSHEDPEVQFKWYVDGVEVHNAKTKPREEQYNSTFRVVSVLTVLHQDWLNGKEYKCKVSNKALPAPIEKTISKTKGQPREPAVYTLPPSREEMTKNQVKLVCLVTGFYPSDIAVEWESSGQPENNYYTTPPMLDSDGSFSLVSWLNVDKSRWQQGNIFSCSVMHEALHNRFTQKSLSLSPG

SEQ ID NO: 327 - protein, 214 aa, Artificial Sequence
  SEQ ID NO: 327 - BEAT EGFRpani-maxgraft/CD3(SP34-Kappa2) antibody FAB light chain (anti-EGFR panitumumab maxgraft FAB arm)
DIQMTQSPSSLSASVGDRVTITCQASQDISNYLNWYQQKPGKAPKLLIYDASNLETGVPSRFSGSGSGTDFTFTISSLQPEDIATYFCQHFDHLPLAFGGGTKVEIKRTVAAPSVFIFPPSDEQLKSGTASVVCLLNNFYPREAKVQWKVDNALQSGNSQESVTEQDSKDSTYSLSSTLTLSKADYEKHKVYACEVTHQGLSSPVTKSFNRGEC

SEQ ID NO: 328 - protein, 448 aa, Artificial Sequence
  SEQ ID NO: 328 - BEAT EGFRpani-mingraft/CD3(SP34-Kappa2) antibody FAB heavy chain (anti-EGFR panitumumab mingraft FAB arm with G65S substitution BT33 LALA)
EVQLVESGGGLVQPGGSLRLSCAASGGSVSSGDYYMSWVRQAPGKGLEWVSAIYYSGNTYYADSVKSRFTISRDNSKNTLYLQMNSLRAEDTAVYYCVRDRVTGAFDIWGQGTLVTVSSASTKGPSVFPLAPSSKSTSGGTAALGCLVKDYFPEPVTVSWNSGALTSGVHTFPAVLQSSGLYSLSSVVTVPSSSLGTQTYICNVNHKPSNTKVDKKVEPKSCDKTHTCPPCPAPEAAGGPSVFLFPPKPKDTLMISRTPEVTCVVVDVSHEDPEVQFKWYVDGVEVHNAKTKPREEQYNSTFRVVSVLTVLHQDWLNGKEYKCKVSNKALPAPIEKTISKTKGQPREPAVYTLPPSREEMTKNQVKLVCLVTGFYPSDIAVEWESSGQPENNYYTTPPMLDSDGSFSLVSWLNVDKSRWQQGNIFSCSVMHEALHNRFTQKSLSLSPG

SEQ ID NO: 329 - protein, 214 aa, Artificial Sequence
  SEQ ID NO: 329 - BEAT EGFRpani-mingraft/CD3(SP34-Kappa2) antibody FAB light chain (anti-EGFR panitumumab mingraft FAB arm)
DIQMTQSPSSLSASVGDRVTITCRASQDISNYLNWYQQKPGKAPKLLIYDASSLQSGVPSRFSGSGSGTDFTLTISSLQPEDFATYYCQHFDHLPLAFGQGTKVEIKRTVAAPSVFIFPPSDEQLKSGTASVVCLLNNFYPREAKVQWKVDNALQSGNSQESVTEQDSKDSTYSLSSTLTLSKADYEKHKVYACEVTHQGLSSPVTKSFNRGEC

SEQ ID NO: 330 - protein, 449 aa, Artificial Sequence
  SEQ ID NO: 330 - BEAT CD19/CD3(SP34-Kappa2) antibody FAB heavy chain (anti-CD19 FAB arm with G65S substitution BT33 LALA)
QVQLVQSGGGVVQPGRSLRLSCAASGVSLPDYGVSWVRQAPGKGLEWVAVIWGSETTYYNSALKSRFTISRDNSKNTLYLQMNSLRAEDTAVYYCAKHYYYGGSYAMDYWGQGTLVTVSSASTKGPSVFPLAPSSKSTSGGTAALGCLVKDYFPEPVTVSWNSGALTSGVHTFPAVLQSSGLYSLSSVVTVPSSSLGTQTYICNVNHKPSNTKVDKKVEPKSCDKTHTCPPCPAPEAAGGPSVFLFPPKPKDTLMISRTPEVTCVVVDVSHEDPEVQFKWYVDGVEVHNAKTKPREEQYNSTFRVVSVLTVLHQDWLNGKEYKCKVSNKALPAPIEKTISKTKGQPREPAVYTLPPSREEMTKNQVKLVCLVTGFYPSDIAVEWESSGQPENNYYTTPPMLDSDGSFSLVSWLNVDKSRWQQGNIFSCSVMHEALHNRFTQKSLSLSPG

SEQ ID NO: 331 - protein, 214 aa, Artificial Sequence
  SEQ ID NO: 331 - BEAT CD19/CD3(SP34-Kappa2) antibody FAB light chain (anti-CD19 FAB arm)
DIQMTQSPSSLSASVGDRVTITCRASQDISKYLNWYQQKPGKAIKLLIYHTSRLHSGVPSRFSGSGSGTDFTLTISSLQPEDFATYYCQQGATLPYTFGPGTKVDIKRTVAAPSVFIFPPSDEQLKSGTASVVCLLNNFYPREAKVQWKVDNALQSGNSQESVTEQDSKDSTYSLSSTLTLSKADYEKHKVYACEVTHQGLSSPVTKSFNRGEC

SEQ ID NO: 332 - protein, 450 aa, Artificial Sequence
  SEQ ID NO: 332 - BEAT IgEomali-maxgraft/CD3(SP34-Kappa2) antibody FAB heavy chain (anti-IgE omalizumab maxgraft FAB arm with G65S substitution BT33 LALA)
EVQLVESGGGLVQPGGSLRLSCAVSGYSITSGYSWNWIRQAPGKGLEWVASITYDGSTNYADSVKSRFTISRDDSKNTFYLQMNSLRAEDTAVYYCARGSHYFGHWHFAVWGQGTLVTVSSASTKGPSVFPLAPSSKSTSGGTAALGCLVKDYFPEPVTVSWNSGALTSGVHTFPAVLQSSGLYSLSSVVTVPSSSLGTQTYICNVNHKPSNTKVDKKVEPKSCDKTHTCPPCPAPEAAGGPSVFLFPPKPKDTLMISRTPEVTCVVVDVSHEDPEVQFKWYVDGVEVHNAKTKPREEQYNSTFRVVSVLTVLHQDWLNGKEYKCKVSNKALPAPIEKTISKTKGQPREPAVYTLPPSREEMTKNQVKLVCLVTGFYPSDIAVEWESSGQPENNYYTTPPMLDSDGSFSLVSWLNVDKSRWQQGNIFSCSVMHEALHNRFTQKSLSLSPG

SEQ ID NO: 333 - protein, 218 aa, Artificial Sequence
  SEQ ID NO: 333 - BEAT IgEomali-maxgraft/CD3(SP34-Kappa2) antibody FAB light chain (anti-IgE omalizumab maxgraft FAB arm)
DIQLTQSPSSLSASVGDRVTITCRASQSVDYDGDSYMNWYQQKPGKAPKLLIYAASYLESGVPSRFSGSGSGTDFTLTISSLQPEDFATYYCQQSHEDPYTFGQGTKVEIKRTVAAPSVFIFPPSDEQLKSGTASVVCLLNNFYPREAKVQWKVDNALQSGNSQESVTEQDSKDSTYSLSSTLTLSKADYEKHKVYACEVTHQGLSSPVTKSFNRGEC

SEQ ID NO: 334 - protein, 450 aa, Artificial Sequence
  SEQ ID NO: 334 - BEAT IgEomali-mingraft/CD3(SP34-Kappa2) antibody FAB heavy chain (anti-IgE omalizumab mingraft FAB arm with G65S substitution BT33 LALA)
EVQLVESGGGLVQPGGSLRLSCAASGYSITSGYSMSWVRQAPGKGLEWVSAITYDGSTYYADSVKSRFTISRDNSKNTLYLQMNSLRAEDTAVYYCARGSHYFGHWHFAVWGQGTLVTVSSASTKGPSVFPLAPSSKSTSGGTAALGCLVKDYFPEPVTVSWNSGALTSGVHTFPAVLQSSGLYSLSSVVTVPSSSLGTQTYICNVNHKPSNTKVDKKVEPKSCDKTHTCPPCPAPEAAGGPSVFLFPPKPKDTLMISRTPEVTCVVVDVSHEDPEVQFKWYVDGVEVHNAKTKPREEQYNSTFRVVSVLTVLHQDWLNGKEYKCKVSNKALPAPIEKTISKTKGQPREPAVYTLPPSREEMTKNQVKLVCLVTGFYPSDIAVEWESSGQPENNYYTTPPMLDSDGSFSLVSWLNVDKSRWQQGNIFSCSVMHEALHNRFTQKSLSLSPG

SEQ ID NO: 335 - protein, 218 aa, Artificial Sequence
  SEQ ID NO: 335 - BEAT IgEomali-mingraft/CD3(SP34-Kappa2) antibody FAB light chain (anti-IgE omalizumab mingraft FAB arm)
DIQMTQSPSSLSASVGDRVTITCRASQSVDYDGDSYLNWYQQKPGKAPKLLIYAASSLQSGVPSRFSGSGSGTDFTLTISSLQPEDFATYYCQQSHEDPYTFGQGTKVEIKRTVAAPSVFIFPPSDEQLKSGTASVVCLLNNFYPREAKVQWKVDNALQSGNSQESVTEQDSKDSTYSLSSTLTLSKADYEKHKVYACEVTHQGLSSPVTKSFNRGEC

SEQ ID NO: 336 - protein, 447 aa, Artificial Sequence
  SEQ ID NO: 336 - BEAT IgEbsw17-maxgraft/CD3(SP34-Kappa2) antibody FAB heavy chain (anti-IgE omalizumab maxgraft FAB arm with G65S substitution BT33 LALA)
EVQLVESGGGLVKPGGSLRLSCAVSGFTFSSYAMSWVRQAPGKGLEWVASISSGNIIYYPDNVKSRFTISRDNAKNSLYLQMNSLRAEDTAVYYCTRGRSTYGGFDHWGQGTTVTVSSASTKGPSVFPLAPSSKSTSGGTAALGCLVKDYFPEPVTVSWNSGALTSGVHTFPAVLQSSGLYSLSSVVTVPSSSLGTQTYICNVNHKPSNTKVDKKVEPKSCDKTHTCPPCPAPEAAGGPSVFLFPPKPKDTLMISRTPEVTCVVVDVSHEDPEVQFKWYVDGVEVHNAKTKPREEQYNSTFRVVSVLTVLHQDWLNGKEYKCKVSNKALPAPIEKTISKTKGQPREPAVYTLPPSREEMTKNQVKLVCLVTGFYPSDIAVEWESSGQPENNYYTTPPMLDSDGSFSLVSWLNVDKSRWQQGNIFSCSVMHEALHNRFTQKSLSLSPG

SEQ ID NO: 337 - protein, 213 aa, Artificial Sequence
  SEQ ID NO: 337 - BEAT IgEbsw17-maxgraft/CD3(SP34-Kappa2) antibody FAB light chain (anti-IgE omalizumab maxgraft FAB arm)
DLQMTQSPSSLSASVGDRVTITCSASSSVTFLNWYQQKPGKAPWLLIYDTSSLQSGVPSRFSGSGSGTDYTLTISSMQPEDFATYYCQHWSGNPLTFGQGTKVEIKRTVAAPSVFIFPPSDEQLKSGTASVVCLLNNFYPREAKVQWKVDNALQSGNSQESVTEQDSKDSTYSLSSTLTLSKADYEKHKVYACEVTHQGLSSPVTKSFNRGEC

SEQ ID NO: 338 - protein, 447 aa, Artificial Sequence
  SEQ ID NO: 338 - BEAT IgEbsw17-mingraft/CD3(SP34-Kappa2) antibody FAB heavy chain (anti-IgE omalizumab mingraft FAB arm with G65S substitution BT33 LALA)
EVQLVESGGGLVQPGGSLRLSCAASGFTFSSYAMSWVRQAPGKGLEWVSAISSGNIIYYADSVKSRFTISRDNSKNTLYLQMNSLRAEDTAVYYCTRGRSTYGGFDHWGQGTLVTVSSASTKGPSVFPLAPSSKSTSGGTAALGCLVKDYFPEPVTVSWNSGALTSGVHTFPAVLQSSGLYSLSSVVTVPSSSLGTQTYICNVNHKPSNTKVDKKVEPKSCDKTHTCPPCPAPEAAGGPSVFLFPPKPKDTLMISRTPEVTCVVVDVSHEDPEVQFKWYVDGVEVHNAKTKPREEQYNSTFRVVSVLTVLHQDWLNGKEYKCKVSNKALPAPIEKTISKTKGQPREPAVYTLPPSREEMTKNQVKLVCLVTGFYPSDIAVEWESSGQPENNYYTTPPMLDSDGSFSLVSWLNVDKSRWQQGNIFSCSVMHEALHNRFTQKSLSLSPG

SEQ ID NO: 339 - protein, 213 aa, Artificial Sequence
  SEQ ID NO: 339 - BEAT IgEbsw17-mingraft/CD3(SP34-Kappa2) antibody FAB light chain (anti-IgE omalizumab mingraft FAB arm)
DIQMTQSPSSLSASVGDRVTITCRASSSVTFLNWYQQKPGKAPKLLIYDTSSLQSGVPSRFSGSGSGTDFTLTISSLQPEDFATYYCQHWSGNPLTFGQGTKVEIKRTVAAPSVFIFPPSDEQLKSGTASVVCLLNNFYPREAKVQWKVDNALQSGNSQESVTEQDSKDSTYSLSSTLTLSKADYEKHKVYACEVTHQGLSSPVTKSFNRGEC

SEQ ID NO: 340 - protein, 447 aa, Artificial Sequence
  SEQ ID NO: 340 - BEAT OX40/CD3(SP34-Kappa2) antibody FAB heavy chain (anti-OX40 1D4 FAB arm BT33 LALA)
QVTLKESGPALVKPTQTLTLTCSFSGFSLSTSGMGVGWIRQPPGKALEWIAHIWWDDDKYYNTALKTRLTISKDTSKNQVVLTMTNMDPVDTATYYCARIDWDGFAYWGQGTLVTVSSASTKGPSVFPLAPSSKSTSGGTAALGCLVKDYFPEPVTVSWNSGALTSGVHTFPAVLQSSGLYSLSSVVTVPSSSLGTQTYICNVNHKPSNTKVDKKVEPKSCDKTHTCPPCPAPEAAGGPSVFLFPPKPKDTLMISRTPEVTCVVVDVSHEDPEVQFKWYVDGVEVHNAKTKPREEQYNSTFRVVSVLTVLHQDWLNGKEYKCKVSNKALPAPIEKTISKTKGQPREPAVYTLPPSREEMTKNQVKLVCLVTGFYPSDIAVEWESSGQPENNYYTTPPMLDSDGSFSLVSWLNVDKSRWQQGNIFSCSVMHEALHNRFTQKSLSLSPG

SEQ ID NO: 341 - protein, 450 aa, Artificial Sequence
  SEQ ID NO: 341 - BEAT CD20/CD3(SP34-Kappa2) antibody FAB heavy chain (anti-CD20 rituximab FAB arm BT33 LALA)
QVQLQQPGAELVKPGASVKMSCKASGYTFTSYNMHWVKQTPGRGLEWIGAIYPGNGDTSYNQKFKGKATLTADKSSSTAYMQLSSLTSEDSAVYYCARSTYYGGDWYFNVWGAGTTVTVSAASTKGPSVFPLAPSSKSTSGGTAALGCLVKDYFPEPVTVSWNSGALTSGVHTFPAVLQSSGLYSLSSVVTVPSSSLGTQTYICNVNHKPSNTKVDKKVEPKSCDKTHTCPPCPAPEAAGGPSVFLFPPKPKDTLMISRTPEVTCVVVDVSHEDPEVQFKWYVDGVEVHNAKTKPREEQYNSTFRVVSVLTVLHQDWLNGKEYKCKVSNKALPAPIEKTISKTKGQPREPAVYTLPPSREEMTKNQVKLVCLVTGFYPSDIAVEWESSGQPENNYYTTPPMLDSDGSFSLVSWLNVDKSRWQQGNIFSCSVMHEALHNRFTQKSLSLSPG

SEQ ID NO: 342 - protein, 448 aa, Artificial Sequence
  SEQ ID NO: 342 - BEAT EGFRcetux/CD3(SP34-Kappa2) antibody FAB heavy chain (anti-EGFR cetuximab FAB arm BT33 LALA)
QVQLKQSGPGLVQPSQSLSITCTVSGFSLTNYGVHWVRQSPGKGLEWLGVIWSGGNTDYNTPFTSRLSINKDNSKSQVFFKMNSLQSNDTAIYYCARALTYYDYEFAYWGQGTLVTVSAASTKGPSVFPLAPSSKSTSGGTAALGCLVKDYFPEPVTVSWNSGALTSGVHTFPAVLQSSGLYSLSSVVTVPSSSLGTQTYICNVNHKPSNTKVDKKVEPKSCDKTHTCPPCPAPEAAGGPSVFLFPPKPKDTLMISRTPEVTCVVVDVSHEDPEVQFKWYVDGVEVHNAKTKPREEQYNSTFRVVSVLTVLHQDWLNGKEYKCKVSNKALPAPIEKTISKTKGQPREPAVYTLPPSREEMTKNQVKLVCLVTGFYPSDIAVEWESSGQPENNYYTTPPMLDSDGSFSLVSWLNVDKSRWQQGNIFSCSVMHEALHNRFTQKSLSLSPG

SEQ ID NO: 343 - protein, 448 aa, Artificial Sequence
  SEQ ID NO: 343 - BEAT EGFRpani/CD3(SP34-Kappa2) antibody FAB heavy chain (anti-EGFR panitumumab FAB arm BT33 LALA)
QVQLQESGPGLVKPSETLSLTCTVSGGSVSSGDYYWTWIRQSPGKGLEWIGHIYYSGNTNYNPSLKSRLTISIDTSKTQFSLKLSSVTAADTAIYYCVRDRVTGAFDIWGQGTMVTVSSASTKGPSVFPLAPSSKSTSGGTAALGCLVKDYFPEPVTVSWNSGALTSGVHTFPAVLQSSGLYSLSSVVTVPSSSLGTQTYICNVNHKPSNTKVDKKVEPKSCDKTHTCPPCPAPEAAGGPSVFLFPPKPKDTLMISRTPEVTCVVVDVSHEDPEVQFKWYVDGVEVHNAKTKPREEQYNSTFRVVSVLTVLHQDWLNGKEYKCKVSNKALPAPIEKTISKTKGQPREPAVYTLPPSREEMTKNQVKLVCLVTGFYPSDIAVEWESSGQPENNYYTTPPMLDSDGSFSLVSWLNVDKSRWQQGNIFSCSVMHEALHNRFTQKSLSLSPG

SEQ ID NO: 344 - protein, 214 aa, Artificial Sequence; identical to SEQ ID NO: 327
  SEQ ID NO: 344 - BEAT EGFRpani/CD3(SP34-Kappa2) antibody FAB light chain (anti-EGFR panitumumab FAB arm)

SEQ ID NO: 345 - protein, 450 aa, Artificial Sequence
  SEQ ID NO: 345 - BEAT IgEomali/CD3(SP34-Kappa2) antibody FAB heavy chain (anti-IgE omalizumab FAB arm BT33 LALA)
EVQLVESGGGLVQPGGSLRLSCAVSGYSITSGYSWNWIRQAPGKGLEWVASITYDGSTNYADSVKGRFTISRDDSKNTFYLQMNSLRAEDTAVYYCARGSHYFGHWHFAVWGQGTLVTVSSASTKGPSVFPLAPSSKSTSGGTAALGCLVKDYFPEPVTVSWNSGALTSGVHTFPAVLQSSGLYSLSSVVTVPSSSLGTQTYICNVNHKPSNTKVDKKVEPKSCDKTHTCPPCPAPEAAGGPSVFLFPPKPKDTLMISRTPEVTCVVVDVSHEDPEVQFKWYVDGVEVHNAKTKPREEQYNSTFRVVSVLTVLHQDWLNGKEYKCKVSNKALPAPIEKTISKTKGQPREPAVYTLPPSREEMTKNQVKLVCLVTGFYPSDIAVEWESSGQPENNYYTTPPMLDSDGSFSLVSWLNVDKSRWQQGNIFSCSVMHEALHNRFTQKSLSLSPG

SEQ ID NO: 346 - protein, 218 aa, Artificial Sequence; identical to SEQ ID NO: 333
  SEQ ID NO: 346 - BEAT IgEomali/CD3(SP34-Kappa2) antibody FAB light chain (anti-IgE omalizumab FAB arm)

SEQ ID NO: 347 - protein, 447 aa, Artificial Sequence
  SEQ ID NO: 347 - BEAT IgEbsw17/CD3(SP34-Kappa2) antibody FAB heavy chain (anti-IgE Bsw17 FAB arm BT33 LALA)
EVQLLESGGGFVKPGGSLKLSCVVSGFTFSSYAMSWVRQTPEKRLEWVASISSGNIIYYPDNVKGRFTISRDNVRNILYLQMSSLRSEDTAMYYCTRGRSTYGGFDHWGQGTTLTVSSASTKGPSVFPLAPSSKSTSGGTAALGCLVKDYFPEPVTVSWNSGALTSGVHTFPAVLQSSGLYSLSSVVTVPSSSLGTQTYICNVNHKPSNTKVDKKVEPKSCDKTHTCPPCPAPEAAGGPSVFLFPPKPKDTLMISRTPEVTCVVVDVSHEDPEVQFKWYVDGVEVHNAKTKPREEQYNSTFRVVSVLTVLHQDWLNGKEYKCKVSNKALPAPIEKTISKTKGQPREPAVYTLPPSREEMTKNQVKLVCLVTGFYPSDIAVEWESSGQPENNYYTTPPMLDSDGSFSLVSWLNVDKSRWQQGNIFSCSVMHEALHNRFTQKSLSLSPG

SEQ ID NO: 348 - protein, 213 aa, Artificial Sequence
  SEQ ID NO: 348 - BEAT IgEbsw17/CD3(SP34-Kappa2) antibody FAB light chain (anti-IgE Bsw17 FAB arm)
ELVMTQSPAIMSASPGEKVTMTCSASSSVTFIHWYRQKSGTSPKGWIYDTSKLASGVPARFSGSGSGTSYSLTISTMEAEDAATYYCQHWSGNPLTFGTGTKLELKRTVAAPSVFIFPPSDEQLKSGTASVVCLLNNFYPREAKVQWKVDNALQSGNSQESVTEQDSKDSTYSLSSTLTLSKADYEKHKVYACEVTHQGLSSPVTKSFNRGEC

SEQ ID NO: 349 - protein, 482 aa, Artificial Sequence
  SEQ ID NO: 349 - scFv fragment  humanized SP34 VH1-VL24 - human IgG1 Fc fusion
EVQLVESGGGLVQPGGSLRLSCAASGFTFNTYAMNWVRQAPGKGLEWVARIRSKYNNYATYYADSVKGRFTISRDDSKNTLYLQMNSLRAEDTAVYYCVRHGNFGNSYVSWFAYWGQGTTVTVSSGGGGSGGGGSGGGGSEIVVTQSPATLSVSPGERATLSCRSSAAAVTTSNYANWVQEKPGQAFRGLIGGANKRAPGVPARFSGSLSGDEATLTISSLQSEDFAVYYCALWYSNLWVFGQGTKLEIKGGGGTDKTHTCPPCPAPELLGGPSVFLFPPKPKDTLMISRTPEVTCVVVDVSHEDPEVKFNWYVDGVEVHNAKTKPREEQYNSTYRVVSVLTVLHQDWLNGKEYKCKVSNKALPAPIEKTISKAKGQPREPQVYTLPPSRDELTKNQVSLTCLVKGFYPSDIAVEWESNGQPENNYKTTPPVLDSDGSFFLYSKLTVDKSRWQQGNVFSCSVMHEALHNHYTQKSLSLSPGK

SEQ ID NO: 350 - protein, 482 aa, Artificial Sequence
  SEQ ID NO: 350 - scFv fragment  humanized SP34 VH1-VL25 - human IgG1 Fc fusion
EVQLVESGGGLVQPGGSLRLSCAASGFTFNTYAMNWVRQAPGKGLEWVARIRSKYNNYATYYADSVKGRFTISRDDSKNTLYLQMNSLRAEDTAVYYCVRHGNFGNSYVSWFAYWGQGTTVTVSSGGGGSGGGGSGGGGSEIVVTQSPATLSVSPGERATLSCRSSTGAAATSNYANWVQEKPGQAFRGLIGGANKRAPGVPARFSGSLSGDEATLTISSLQSEDFAVYYCALWYSNLWVFGQGTKLEIKGGGGTDKTHTCPPCPAPELLGGPSVFLFPPKPKDTLMISRTPEVTCVVVDVSHEDPEVKFNWYVDGVEVHNAKTKPREEQYNSTYRVVSVLTVLHQDWLNGKEYKCKVSNKALPAPIEKTISKAKGQPREPQVYTLPPSRDELTKNQVSLTCLVKGFYPSDIAVEWESNGQPENNYKTTPPVLDSDGSFFLYSKLTVDKSRWQQGNVFSCSVMHEALHNHYTQKSLSLSPGK

SEQ ID NO: 351 - protein, 482 aa, Artificial Sequence
  SEQ ID NO: 351 - scFv fragment  humanized SP34 VH1-VL26 - human IgG1 Fc fusion
EVQLVESGGGLVQPGGSLRLSCAASGFTFNTYAMNWVRQAPGKGLEWVARIRSKYNNYATYYADSVKGRFTISRDDSKNTLYLQMNSLRAEDTAVYYCVRHGNFGNSYVSWFAYWGQGTTVTVSSGGGGSGGGGSGGGGSEIVVTQSPATLSVSPGERATLSCRSSTGAVTAANYANWVQEKPGQAFRGLIGGANKRAPGVPARFSGSLSGDEATLTISSLQSEDFAVYYCALWYSNLWVFGQGTKLEIKGGGGTDKTHTCPPCPAPELLGGPSVFLFPPKPKDTLMISRTPEVTCVVVDVSHEDPEVKFNWYVDGVEVHNAKTKPREEQYNSTYRVVSVLTVLHQDWLNGKEYKCKVSNKALPAPIEKTISKAKGQPREPQVYTLPPSRDELTKNQVSLTCLVKGFYPSDIAVEWESNGQPENNYKTTPPVLDSDGSFFLYSKLTVDKSRWQQGNVFSCSVMHEALHNHYTQKSLSLSPGK

SEQ ID NO: 352 - protein, 8 aa, Artificial Sequence
  SEQ ID NO: 352 - Humanized anti- human CD3 epsilon SP34 VH5 CDR H1
GFTFNTYA

SEQ ID NO: 353 - protein, 10 aa, Artificial Sequence
  SEQ ID NO: 353 - Humanized anti- human CD3 epsilon SP34 VH5 CDR H2
IRSKYNNYAT

SEQ ID NO: 354 - protein, 16 aa, Artificial Sequence
  SEQ ID NO: 354 - Humanized anti- human CD3 epsilon SP34 VH5 CDR H3
VRHGNFGNSYVSYFAY

SEQ ID NO: 355 - protein, 9 aa, Artificial Sequence
  SEQ ID NO: 355 - Humanized anti- human CD3 epsilon SP34 VL32 CDR L1
TGAVTAANY

SEQ ID NO: 356 - protein, 3 aa, Artificial Sequence
  SEQ ID NO: 356 - Humanized anti- human CD3 epsilon SP34 VL32 CDR L2
GAN

SEQ ID NO: 357 - protein, 9 aa, Artificial Sequence
  SEQ ID NO: 357 - Humanized anti- human CD3 epsilon SP34 VL32 CDR L3
ALFYSNLWV

SEQ ID NO: 358 - protein, 119 aa, Artificial Sequence
  SEQ ID NO: 358 - OKT3 humanized VH9 domain
EVQLVESGGGLVQPGGSLRLSCAASGYTFTRYTMHWVRQAPGKGLEWIGYINPSRGYTYYADSVKSRFTLSTDKSKNTAYLQMNSLRAEDTAVYYCARYYDDHYCLDYWGQGTLVTVSS

SEQ ID NO: 359 - protein, 455 aa, Artificial Sequence
  SEQ ID NO: 359 - SP34 humanized IgG1 heavy chain with VH5
EVQLVESGGGLVQPGGSLRLSCAASGFTFNTYAMNWVRQAPGKGLEWVARIRSKYNNYATYYADSVKGRFTISRDDSKNTLYLQMNSLRAEDTAVYYCVRHGNFGNSYVSYFAYWGQGTTVTVSSASTKGPSVFPLAPSSKSTSGGTAALGCLVKDYFPEPVTVSWNSGALTSGVHTFPAVLQSSGLYSLSSVVTVPSSSLGTQTYICNVNHKPSNTKVDKKVEPKSCDKTHTCPPCPAPELLGGPSVFLFPPKPKDTLMISRTPEVTCVVVDVSHEDPEVKFNWYVDGVEVHNAKTKPREEQYNSTYRVVSVLTVLHQDWLNGKEYKCKVSNKALPAPIEKTISKAKGQPREPQVYTLPPSREEMTKNQVSLTCLVKGFYPSDIAVEWESNGQPENNYKTTPPVLDSDGSFFLYSKLTVDKSRWQQGNVFSCSVMHEALHNHYTQKSLSLSPGK

SEQ ID NO: 360 - protein, 218 aa, Artificial Sequence
  SEQ ID NO: 360 - SP34 humanized Light chain with VL32
EIVVTQSPATLSVSPGERATLSCRSSTGAVTAANYANWVQEKPGQAFRGLIGGANKRAPGVPARFSGSLSGDEATLTISSLQSEDFAVYYCALFYSNLWVFGQGTKLEIKKRTVAAPSVFIFPPSDEQLKSGTASVVCLLNNFYPREAKVQWKVDNALQSGNSQESVTEQDSKDSTYSLSSTLTLSKADYEKHKVYACEVTHQGLSSPVTKSFNRGEC

SEQ ID NO: 361 - protein, 482 aa, Artificial Sequence
  SEQ ID NO: 361 - scFv fragment  humanized SP34  VH1-VL21 human IgG1 Fc fusion
EVQLVESGGGLVQPGGSLRLSCAASGFTFNTYAMNWVRQAPGKGLEWVARIRSKYNNYATYYADSVKGRFTISRDDSKNTLYLQMNSLRAEDTAVYYCVRHGNFGNSYVSWFAYWGQGTTVTVSSGGGGSGGGGSGGGGSEIVVTQSPATLSVSPGERATLSCRSSTGAVTTSNYANWVQEKPGQAFRGLIGGANKRAPGVPARFSGSLSGDEATLTISSLQSEDFAVYYCALWYSNLWVFGQGTKLEIKGGGGTDKTHTCPPCPAPELLGGPSVFLFPPKPKDTLMISRTPEVTCVVVDVSHEDPEVKFNWYVDGVEVHNAKTKPREEQYNSTYRVVSVLTVLHQDWLNGKEYKCKVSNKALPAPIEKTISKAKGQPREPQVYTLPPSRDELTKNQVSLTCLVKGFYPSDIAVEWESNGQPENNYKTTPPVLDSDGSFFLYSKLTVDKSRWQQGNVFSCSVMHEALHNHYTQKSLSLSPGK

SEQ ID NO: 362 - protein, 482 aa, Artificial Sequence
  SEQ ID NO: 362 - scFv fragment  humanized SP34 VH1-VL33 - human IgG1 Fc fusion
EVQLVESGGGLVQPGGSLRLSCAASGFTFNTYAMNWVRQAPGKGLEWVARIRSKYNNYATYYADSVKGRFTISRDDSKNTLYLQMNSLRAEDTAVYYCVRHGNFGNSYVSWFAYWGQGTTVTVSSGGGGSGGGGSGGGGSEIVVTQSPATLSVSPGERATLSCRSSTGAVTAANYANWVQEKPGQAFRGLIGGANKRAPGVPARFSGSLSGDEATLTISSLQSEDFAVYYCAAFYSNLWVFGQGTKLEIKGGGGTDKTHTCPPCPAPELLGGPSVFLFPPKPKDTLMISRTPEVTCVVVDVSHEDPEVKFNWYVDGVEVHNAKTKPREEQYNSTYRVVSVLTVLHQDWLNGKEYKCKVSNKALPAPIEKTISKAKGQPREPQVYTLPPSRDELTKNQVSLTCLVKGFYPSDIAVEWESNGQPENNYKTTPPVLDSDGSFFLYSKLTVDKSRWQQGNVFSCSVMHEALHNHYTQKSLSLSPGK

SEQ ID NO: 363 - protein, 482 aa, Artificial Sequence
  SEQ ID NO: 363 - scFv fragment  humanized SP34 VH1-VL34 - human IgG1 Fc fusion
EVQLVESGGGLVQPGGSLRLSCAASGFTFNTYAMNWVRQAPGKGLEWVARIRSKYNNYATYYADSVKGRFTISRDDSKNTLYLQMNSLRAEDTAVYYCVRHGNFGNSYVSWFAYWGQGTTVTVSSGGGGSGGGGSGGGGSEIVVTQSPATLSVSPGERATLSCRSSTGAVTAANYANWVQEKPGQAFRGLIGGANKRAPGVPARFSGSLSGDEATLTISSLQSEDFAVYYCALFYSNAWVFGQGTKLEIKGGGGTDKTHTCPPCPAPELLGGPSVFLFPPKPKDTLMISRTPEVTCVVVDVSHEDPEVKFNWYVDGVEVHNAKTKPREEQYNSTYRVVSVLTVLHQDWLNGKEYKCKVSNKALPAPIEKTISKAKGQPREPQVYTLPPSRDELTKNQVSLTCLVKGFYPSDIAVEWESNGQPENNYKTTPPVLDSDGSFFLYSKLTVDKSRWQQGNVFSCSVMHEALHNHYTQKSLSLSPGK

SEQ ID NO: 364 - protein, 482 aa, Artificial Sequence
  SEQ ID NO: 364 - scFv fragment  humanized SP34 VH3-VL35 - human IgG1 Fc fusion  (T29A)
EVQLVESGGGLVQPGGSLRLSCAASGFTFNTYAMNWVRQAPGKGLEWVARIRSKYNNYATYYADSVKSRFTISRDDSKNTLYLQMNSLRAEDTAVYYCVRHGNFGNSYVSYFAYWGQGTTVTVSSGGGGSGGGGSGGGGSEIVVTQSPATLSVSPGERATLSCRSSTGAVTASNYANWVQEKPGQAFRGLIGGANKRAPGVPARFSGSLSGDEATLTISSLQSEDFAVYYCALFYSNLWVFGQGTKLEIKGGGGTDKTHTCPPCPAPELLGGPSVFLFPPKPKDTLMISRTPEVTCVVVDVSHEDPEVKFNWYVDGVEVHNAKTKPREEQYNSTYRVVSVLTVLHQDWLNGKEYKCKVSNKALPAPIEKTISKAKGQPREPQVYTLPPSRDELTKNQVSLTCLVKGFYPSDIAVEWESNGQPENNYKTTPPVLDSDGSFFLYSKLTVDKSRWQQGNVFSCSVMHEALHNHYTQKSLSLSPGK

SEQ ID NO: 365 - protein, 482 aa, Artificial Sequence
  SEQ ID NO: 365 - scFv fragment  humanized SP34 VH3-VL36 - human IgG1 Fc fusion  (T29V)
EVQLVESGGGLVQPGGSLRLSCAASGFTFNTYAMNWVRQAPGKGLEWVARIRSKYNNYATYYADSVKSRFTISRDDSKNTLYLQMNSLRAEDTAVYYCVRHGNFGNSYVSYFAYWGQGTTVTVSSGGGGSGGGGSGGGGSEIVVTQSPATLSVSPGERATLSCRSSTGAVTVSNYANWVQEKPGQAFRGLIGGANKRAPGVPARFSGSLSGDEATLTISSLQSEDFAVYYCALFYSNLWVFGQGTKLEIKGGGGTDKTHTCPPCPAPELLGGPSVFLFPPKPKDTLMISRTPEVTCVVVDVSHEDPEVKFNWYVDGVEVHNAKTKPREEQYNSTYRVVSVLTVLHQDWLNGKEYKCKVSNKALPAPIEKTISKAKGQPREPQVYTLPPSRDELTKNQVSLTCLVKGFYPSDIAVEWESNGQPENNYKTTPPVLDSDGSFFLYSKLTVDKSRWQQGNVFSCSVMHEALHNHYTQKSLSLSPGK

SEQ ID NO: 366 - protein, 482 aa, Artificial Sequence
  SEQ ID NO: 366 - scFv fragment  humanized SP34 VH3-VL37 - human IgG1 Fc fusion (T29C)
EVQLVESGGGLVQPGGSLRLSCAASGFTFNTYAMNWVRQAPGKGLEWVARIRSKYNNYATYYADSVKSRFTISRDDSKNTLYLQMNSLRAEDTAVYYCVRHGNFGNSYVSYFAYWGQGTTVTVSSGGGGSGGGGSGGGGSEIVVTQSPATLSVSPGERATLSCRSSTGAVTCSNYANWVQEKPGQAFRGLIGGANKRAPGVPARFSGSLSGDEATLTISSLQSEDFAVYYCALFYSNLWVFGQGTKLEIKGGGGTDKTHTCPPCPAPELLGGPSVFLFPPKPKDTLMISRTPEVTCVVVDVSHEDPEVKFNWYVDGVEVHNAKTKPREEQYNSTYRVVSVLTVLHQDWLNGKEYKCKVSNKALPAPIEKTISKAKGQPREPQVYTLPPSRDELTKNQVSLTCLVKGFYPSDIAVEWESNGQPENNYKTTPPVLDSDGSFFLYSKLTVDKSRWQQGNVFSCSVMHEALHNHYTQKSLSLSPGK

SEQ ID NO: 367 - protein, 482 aa, Artificial Sequence
  SEQ ID NO: 367 - scFv fragment  humanized SP34 VH3-VL38 - human IgG1 Fc fusion(T29G)
EVQLVESGGGLVQPGGSLRLSCAASGFTFNTYAMNWVRQAPGKGLEWVARIRSKYNNYATYYADSVKSRFTISRDDSKNTLYLQMNSLRAEDTAVYYCVRHGNFGNSYVSYFAYWGQGTTVTVSSGGGGSGGGGSGGGGSEIVVTQSPATLSVSPGERATLSCRSSTGAVTGSNYANWVQEKPGQAFRGLIGGANKRAPGVPARFSGSLSGDEATLTISSLQSEDFAVYYCALFYSNLWVFGQGTKLEIKGGGGTDKTHTCPPCPAPELLGGPSVFLFPPKPKDTLMISRTPEVTCVVVDVSHEDPEVKFNWYVDGVEVHNAKTKPREEQYNSTYRVVSVLTVLHQDWLNGKEYKCKVSNKALPAPIEKTISKAKGQPREPQVYTLPPSRDELTKNQVSLTCLVKGFYPSDIAVEWESNGQPENNYKTTPPVLDSDGSFFLYSKLTVDKSRWQQGNVFSCSVMHEALHNHYTQKSLSLSPGK

SEQ ID NO: 368 - protein, 482 aa, Artificial Sequence
  SEQ ID NO: 368 - scFv fragment  humanized SP34 VH3-VL39 - human IgG1 Fc fusion (T29S)
EVQLVESGGGLVQPGGSLRLSCAASGFTFNTYAMNWVRQAPGKGLEWVARIRSKYNNYATYYADSVKSRFTISRDDSKNTLYLQMNSLRAEDTAVYYCVRHGNFGNSYVSYFAYWGQGTTVTVSSGGGGSGGGGSGGGGSEIVVTQSPATLSVSPGERATLSCRSSTGAVTSSNYANWVQEKPGQAFRGLIGGANKRAPGVPARFSGSLSGDEATLTISSLQSEDFAVYYCALFYSNLWVFGQGTKLEIKGGGGTDKTHTCPPCPAPELLGGPSVFLFPPKPKDTLMISRTPEVTCVVVDVSHEDPEVKFNWYVDGVEVHNAKTKPREEQYNSTYRVVSVLTVLHQDWLNGKEYKCKVSNKALPAPIEKTISKAKGQPREPQVYTLPPSRDELTKNQVSLTCLVKGFYPSDIAVEWESNGQPENNYKTTPPVLDSDGSFFLYSKLTVDKSRWQQGNVFSCSVMHEALHNHYTQKSLSLSPGK

SEQ ID NO: 369 - protein, 482 aa, Artificial Sequence
  SEQ ID NO: 369 - scFv fragment  humanized SP34 VH3-VL40 - human IgG1 Fc fusion (T29L)
EVQLVESGGGLVQPGGSLRLSCAASGFTFNTYAMNWVRQAPGKGLEWVARIRSKYNNYATYYADSVKSRFTISRDDSKNTLYLQMNSLRAEDTAVYYCVRHGNFGNSYVSYFAYWGQGTTVTVSSGGGGSGGGGSGGGGSEIVVTQSPATLSVSPGERATLSCRSSTGAVTLSNYANWVQEKPGQAFRGLIGGANKRAPGVPARFSGSLSGDEATLTISSLQSEDFAVYYCALFYSNLWVFGQGTKLEIKGGGGTDKTHTCPPCPAPELLGGPSVFLFPPKPKDTLMISRTPEVTCVVVDVSHEDPEVKFNWYVDGVEVHNAKTKPREEQYNSTYRVVSVLTVLHQDWLNGKEYKCKVSNKALPAPIEKTISKAKGQPREPQVYTLPPSRDELTKNQVSLTCLVKGFYPSDIAVEWESNGQPENNYKTTPPVLDSDGSFFLYSKLTVDKSRWQQGNVFSCSVMHEALHNHYTQKSLSLSPGK

SEQ ID NO: 370 - protein, 482 aa, Artificial Sequence
  SEQ ID NO: 370 - scFv fragment  humanized SP34 VH3-VL41 - human IgG1 Fc fusion (T29F)
EVQLVESGGGLVQPGGSLRLSCAASGFTFNTYAMNWVRQAPGKGLEWVARIRSKYNNYATYYADSVKSRFTISRDDSKNTLYLQMNSLRAEDTAVYYCVRHGNFGNSYVSYFAYWGQGTTVTVSSGGGGSGGGGSGGGGSEIVVTQSPATLSVSPGERATLSCRSSTGAVTFSNYANWVQEKPGQAFRGLIGGANKRAPGVPARFSGSLSGDEATLTISSLQSEDFAVYYCALFYSNLWVFGQGTKLEIKGGGGTDKTHTCPPCPAPELLGGPSVFLFPPKPKDTLMISRTPEVTCVVVDVSHEDPEVKFNWYVDGVEVHNAKTKPREEQYNSTYRVVSVLTVLHQDWLNGKEYKCKVSNKALPAPIEKTISKAKGQPREPQVYTLPPSRDELTKNQVSLTCLVKGFYPSDIAVEWESNGQPENNYKTTPPVLDSDGSFFLYSKLTVDKSRWQQGNVFSCSVMHEALHNHYTQKSLSLSPGK

SEQ ID NO: 371 - protein, 482 aa, Artificial Sequence
  SEQ ID NO: 371 - scFv fragment  humanized SP34 VH3-VL42 - human IgG1 Fc fusion (T29M)
EVQLVESGGGLVQPGGSLRLSCAASGFTFNTYAMNWVRQAPGKGLEWVARIRSKYNNYATYYADSVKSRFTISRDDSKNTLYLQMNSLRAEDTAVYYCVRHGNFGNSYVSYFAYWGQGTTVTVSSGGGGSGGGGSGGGGSEIVVTQSPATLSVSPGERATLSCRSSTGAVTMSNYANWVQEKPGQAFRGLIGGANKRAPGVPARFSGSLSGDEATLTISSLQSEDFAVYYCALFYSNLWVFGQGTKLEIKGGGGTDKTHTCPPCPAPELLGGPSVFLFPPKPKDTLMISRTPEVTCVVVDVSHEDPEVKFNWYVDGVEVHNAKTKPREEQYNSTYRVVSVLTVLHQDWLNGKEYKCKVSNKALPAPIEKTISKAKGQPREPQVYTLPPSRDELTKNQVSLTCLVKGFYPSDIAVEWESNGQPENNYKTTPPVLDSDGSFFLYSKLTVDKSRWQQGNVFSCSVMHEALHNHYTQKSLSLSPGK

SEQ ID NO: 372 - protein, 482 aa, Artificial Sequence
  SEQ ID NO: 372 - scFv fragment  humanized SP34 VH3-VL43 - human IgG1 Fc fusion (T29P)
EVQLVESGGGLVQPGGSLRLSCAASGFTFNTYAMNWVRQAPGKGLEWVARIRSKYNNYATYYADSVKSRFTISRDDSKNTLYLQMNSLRAEDTAVYYCVRHGNFGNSYVSYFAYWGQGTTVTVSSGGGGSGGGGSGGGGSEIVVTQSPATLSVSPGERATLSCRSSTGAVTPSNYANWVQEKPGQAFRGLIGGANKRAPGVPARFSGSLSGDEATLTISSLQSEDFAVYYCALFYSNLWVFGQGTKLEIKGGGGTDKTHTCPPCPAPELLGGPSVFLFPPKPKDTLMISRTPEVTCVVVDVSHEDPEVKFNWYVDGVEVHNAKTKPREEQYNSTYRVVSVLTVLHQDWLNGKEYKCKVSNKALPAPIEKTISKAKGQPREPQVYTLPPSRDELTKNQVSLTCLVKGFYPSDIAVEWESNGQPENNYKTTPPVLDSDGSFFLYSKLTVDKSRWQQGNVFSCSVMHEALHNHYTQKSLSLSPGK

SEQ ID NO: 373 - protein, 482 aa, Artificial Sequence
  SEQ ID NO: 373 - scFv fragment  humanized SP34 VH3-VL44 - human IgG1 Fc fusion (T29E)
EVQLVESGGGLVQPGGSLRLSCAASGFTFNTYAMNWVRQAPGKGLEWVARIRSKYNNYATYYADSVKSRFTISRDDSKNTLYLQMNSLRAEDTAVYYCVRHGNFGNSYVSYFAYWGQGTTVTVSSGGGGSGGGGSGGGGSEIVVTQSPATLSVSPGERATLSCRSSTGAVTESNYANWVQEKPGQAFRGLIGGANKRAPGVPARFSGSLSGDEATLTISSLQSEDFAVYYCALFYSNLWVFGQGTKLEIKGGGGTDKTHTCPPCPAPELLGGPSVFLFPPKPKDTLMISRTPEVTCVVVDVSHEDPEVKFNWYVDGVEVHNAKTKPREEQYNSTYRVVSVLTVLHQDWLNGKEYKCKVSNKALPAPIEKTISKAKGQPREPQVYTLPPSRDELTKNQVSLTCLVKGFYPSDIAVEWESNGQPENNYKTTPPVLDSDGSFFLYSKLTVDKSRWQQGNVFSCSVMHEALHNHYTQKSLSLSPGK

SEQ ID NO: 374 - protein, 482 aa, Artificial Sequence
  SEQ ID NO: 374 - scFv fragment  humanized SP34 VH3-VL45 - human IgG1 Fc fusion (T29R)
EVQLVESGGGLVQPGGSLRLSCAASGFTFNTYAMNWVRQAPGKGLEWVARIRSKYNNYATYYADSVKSRFTISRDDSKNTLYLQMNSLRAEDTAVYYCVRHGNFGNSYVSYFAYWGQGTTVTVSSGGGGSGGGGSGGGGSEIVVTQSPATLSVSPGERATLSCRSSTGAVTRSNYANWVQEKPGQAFRGLIGGANKRAPGVPARFSGSLSGDEATLTISSLQSEDFAVYYCALFYSNLWVFGQGTKLEIKGGGGTDKTHTCPPCPAPELLGGPSVFLFPPKPKDTLMISRTPEVTCVVVDVSHEDPEVKFNWYVDGVEVHNAKTKPREEQYNSTYRVVSVLTVLHQDWLNGKEYKCKVSNKALPAPIEKTISKAKGQPREPQVYTLPPSRDELTKNQVSLTCLVKGFYPSDIAVEWESNGQPENNYKTTPPVLDSDGSFFLYSKLTVDKSRWQQGNVFSCSVMHEALHNHYTQKSLSLSPGK

SEQ ID NO: 375 - protein, 482 aa, Artificial Sequence
  SEQ ID NO: 375 - scFv fragment  humanized SP34 VH3-VL46 - human IgG1 Fc fusion (T29Q)
EVQLVESGGGLVQPGGSLRLSCAASGFTFNTYAMNWVRQAPGKGLEWVARIRSKYNNYATYYADSVKSRFTISRDDSKNTLYLQMNSLRAEDTAVYYCVRHGNFGNSYVSYFAYWGQGTTVTVSSGGGGSGGGGSGGGGSEIVVTQSPATLSVSPGERATLSCRSSTGAVTQSNYANWVQEKPGQAFRGLIGGANKRAPGVPARFSGSLSGDEATLTISSLQSEDFAVYYCALFYSNLWVFGQGTKLEIKGGGGTDKTHTCPPCPAPELLGGPSVFLFPPKPKDTLMISRTPEVTCVVVDVSHEDPEVKFNWYVDGVEVHNAKTKPREEQYNSTYRVVSVLTVLHQDWLNGKEYKCKVSNKALPAPIEKTISKAKGQPREPQVYTLPPSRDELTKNQVSLTCLVKGFYPSDIAVEWESNGQPENNYKTTPPVLDSDGSFFLYSKLTVDKSRWQQGNVFSCSVMHEALHNHYTQKSLSLSPGK

SEQ ID NO: 376 - protein, 482 aa, Artificial Sequence
  SEQ ID NO: 376 - scFv fragment  humanized SP34 VH3-VL47 - human IgG1 Fc fusion (S30A)
EVQLVESGGGLVQPGGSLRLSCAASGFTFNTYAMNWVRQAPGKGLEWVARIRSKYNNYATYYADSVKSRFTISRDDSKNTLYLQMNSLRAEDTAVYYCVRHGNFGNSYVSYFAYWGQGTTVTVSSGGGGSGGGGSGGGGSEIVVTQSPATLSVSPGERATLSCRSSTGAVTTANYANWVQEKPGQAFRGLIGGANKRAPGVPARFSGSLSGDEATLTISSLQSEDFAVYYCALFYSNLWVFGQGTKLEIKGGGGTDKTHTCPPCPAPELLGGPSVFLFPPKPKDTLMISRTPEVTCVVVDVSHEDPEVKFNWYVDGVEVHNAKTKPREEQYNSTYRVVSVLTVLHQDWLNGKEYKCKVSNKALPAPIEKTISKAKGQPREPQVYTLPPSRDELTKNQVSLTCLVKGFYPSDIAVEWESNGQPENNYKTTPPVLDSDGSFFLYSKLTVDKSRWQQGNVFSCSVMHEALHNHYTQKSLSLSPGK

SEQ ID NO: 377 - protein, 482 aa, Artificial Sequence
  SEQ ID NO: 377 - scFv fragment  humanized SP34 VH3-VL48 - human IgG1 Fc fusion (S30I)
EVQLVESGGGLVQPGGSLRLSCAASGFTFNTYAMNWVRQAPGKGLEWVARIRSKYNNYATYYADSVKSRFTISRDDSKNTLYLQMNSLRAEDTAVYYCVRHGNFGNSYVSYFAYWGQGTTVTVSSGGGGSGGGGSGGGGSEIVVTQSPATLSVSPGERATLSCRSSTGAVTTINYANWVQEKPGQAFRGLIGGANKRAPGVPARFSGSLSGDEATLTISSLQSEDFAVYYCALFYSNLWVFGQGTKLEIKGGGGTDKTHTCPPCPAPELLGGPSVFLFPPKPKDTLMISRTPEVTCVVVDVSHEDPEVKFNWYVDGVEVHNAKTKPREEQYNSTYRVVSVLTVLHQDWLNGKEYKCKVSNKALPAPIEKTISKAKGQPREPQVYTLPPSRDELTKNQVSLTCLVKGFYPSDIAVEWESNGQPENNYKTTPPVLDSDGSFFLYSKLTVDKSRWQQGNVFSCSVMHEALHNHYTQKSLSLSPGK

SEQ ID NO: 378 - protein, 482 aa, Artificial Sequence
  SEQ ID NO: 378 - scFv fragment  humanized SP34 VH3-VL49 - human IgG1 Fc fusion (S30L)
EVQLVESGGGLVQPGGSLRLSCAASGFTFNTYAMNWVRQAPGKGLEWVARIRSKYNNYATYYADSVKSRFTISRDDSKNTLYLQMNSLRAEDTAVYYCVRHGNFGNSYVSYFAYWGQGTTVTVSSGGGGSGGGGSGGGGSEIVVTQSPATLSVSPGERATLSCRSSTGAVTTLNYANWVQEKPGQAFRGLIGGANKRAPGVPARFSGSLSGDEATLTISSLQSEDFAVYYCALFYSNLWVFGQGTKLEIKGGGGTDKTHTCPPCPAPELLGGPSVFLFPPKPKDTLMISRTPEVTCVVVDVSHEDPEVKFNWYVDGVEVHNAKTKPREEQYNSTYRVVSVLTVLHQDWLNGKEYKCKVSNKALPAPIEKTISKAKGQPREPQVYTLPPSRDELTKNQVSLTCLVKGFYPSDIAVEWESNGQPENNYKTTPPVLDSDGSFFLYSKLTVDKSRWQQGNVFSCSVMHEALHNHYTQKSLSLSPGK

SEQ ID NO: 379 - protein, 482 aa, Artificial Sequence
  SEQ ID NO: 379 - scFv fragment  humanized SP34 VH3-VL50 - human IgG1 Fc fusion(S30G)
EVQLVESGGGLVQPGGSLRLSCAASGFTFNTYAMNWVRQAPGKGLEWVARIRSKYNNYATYYADSVKSRFTISRDDSKNTLYLQMNSLRAEDTAVYYCVRHGNFGNSYVSYFAYWGQGTTVTVSSGGGGSGGGGSGGGGSEIVVTQSPATLSVSPGERATLSCRSSTGAVTTGNYANWVQEKPGQAFRGLIGGANKRAPGVPARFSGSLSGDEATLTISSLQSEDFAVYYCALFYSNLWVFGQGTKLEIKGGGGTDKTHTCPPCPAPELLGGPSVFLFPPKPKDTLMISRTPEVTCVVVDVSHEDPEVKFNWYVDGVEVHNAKTKPREEQYNSTYRVVSVLTVLHQDWLNGKEYKCKVSNKALPAPIEKTISKAKGQPREPQVYTLPPSRDELTKNQVSLTCLVKGFYPSDIAVEWESNGQPENNYKTTPPVLDSDGSFFLYSKLTVDKSRWQQGNVFSCSVMHEALHNHYTQKSLSLSPGK

SEQ ID NO: 380 - protein, 482 aa, Artificial Sequence
  SEQ ID NO: 380 - scFv fragment  humanized SP34 VH3-VL51 - human IgG1 Fc fusion (S30D)
EVQLVESGGGLVQPGGSLRLSCAASGFTFNTYAMNWVRQAPGKGLEWVARIRSKYNNYATYYADSVKSRFTISRDDSKNTLYLQMNSLRAEDTAVYYCVRHGNFGNSYVSYFAYWGQGTTVTVSSGGGGSGGGGSGGGGSEIVVTQSPATLSVSPGERATLSCRSSTGAVTTDNYANWVQEKPGQAFRGLIGGANKRAPGVPARFSGSLSGDEATLTISSLQSEDFAVYYCALFYSNLWVFGQGTKLEIKGGGGTDKTHTCPPCPAPELLGGPSVFLFPPKPKDTLMISRTPEVTCVVVDVSHEDPEVKFNWYVDGVEVHNAKTKPREEQYNSTYRVVSVLTVLHQDWLNGKEYKCKVSNKALPAPIEKTISKAKGQPREPQVYTLPPSRDELTKNQVSLTCLVKGFYPSDIAVEWESNGQPENNYKTTPPVLDSDGSFFLYSKLTVDKSRWQQGNVFSCSVMHEALHNHYTQKSLSLSPGK

SEQ ID NO: 381 - protein, 482 aa, Artificial Sequence
  SEQ ID NO: 381 - scFv fragment  humanized SP34 VH3-VL52 - human IgG1 Fc fusion (S30Q)
EVQLVESGGGLVQPGGSLRLSCAASGFTFNTYAMNWVRQAPGKGLEWVARIRSKYNNYATYYADSVKSRFTISRDDSKNTLYLQMNSLRAEDTAVYYCVRHGNFGNSYVSYFAYWGQGTTVTVSSGGGGSGGGGSGGGGSEIVVTQSPATLSVSPGERATLSCRSSTGAVTTQNYANWVQEKPGQAFRGLIGGANKRAPGVPARFSGSLSGDEATLTISSLQSEDFAVYYCALFYSNLWVFGQGTKLEIKGGGGTDKTHTCPPCPAPELLGGPSVFLFPPKPKDTLMISRTPEVTCVVVDVSHEDPEVKFNWYVDGVEVHNAKTKPREEQYNSTYRVVSVLTVLHQDWLNGKEYKCKVSNKALPAPIEKTISKAKGQPREPQVYTLPPSRDELTKNQVSLTCLVKGFYPSDIAVEWESNGQPENNYKTTPPVLDSDGSFFLYSKLTVDKSRWQQGNVFSCSVMHEALHNHYTQKSLSLSPGK

SEQ ID NO: 382 - protein, 482 aa, Artificial Sequence
  SEQ ID NO: 382 - scFv fragment  humanized SP34 VH3-VL53 - human IgG1 Fc fusion (S30M)
EVQLVESGGGLVQPGGSLRLSCAASGFTFNTYAMNWVRQAPGKGLEWVARIRSKYNNYATYYADSVKSRFTISRDDSKNTLYLQMNSLRAEDTAVYYCVRHGNFGNSYVSYFAYWGQGTTVTVSSGGGGSGGGGSGGGGSEIVVTQSPATLSVSPGERATLSCRSSTGAVTTMNYANWVQEKPGQAFRGLIGGANKRAPGVPARFSGSLSGDEATLTISSLQSEDFAVYYCALFYSNLWVFGQGTKLEIKGGGGTDKTHTCPPCPAPELLGGPSVFLFPPKPKDTLMISRTPEVTCVVVDVSHEDPEVKFNWYVDGVEVHNAKTKPREEQYNSTYRVVSVLTVLHQDWLNGKEYKCKVSNKALPAPIEKTISKAKGQPREPQVYTLPPSRDELTKNQVSLTCLVKGFYPSDIAVEWESNGQPENNYKTTPPVLDSDGSFFLYSKLTVDKSRWQQGNVFSCSVMHEALHNHYTQKSLSLSPGK

SEQ ID NO: 383 - protein, 482 aa, Artificial Sequence
  SEQ ID NO: 383 - scFv fragment  humanized SP34 VH3-VL54 - human IgG1 Fc fusion (S30H)
EVQLVESGGGLVQPGGSLRLSCAASGFTFNTYAMNWVRQAPGKGLEWVARIRSKYNNYATYYADSVKSRFTISRDDSKNTLYLQMNSLRAEDTAVYYCVRHGNFGNSYVSYFAYWGQGTTVTVSSGGGGSGGGGSGGGGSEIVVTQSPATLSVSPGERATLSCRSSTGAVTTHNYANWVQEKPGQAFRGLIGGANKRAPGVPARFSGSLSGDEATLTISSLQSEDFAVYYCALFYSNLWVFGQGTKLEIKGGGGTDKTHTCPPCPAPELLGGPSVFLFPPKPKDTLMISRTPEVTCVVVDVSHEDPEVKFNWYVDGVEVHNAKTKPREEQYNSTYRVVSVLTVLHQDWLNGKEYKCKVSNKALPAPIEKTISKAKGQPREPQVYTLPPSRDELTKNQVSLTCLVKGFYPSDIAVEWESNGQPENNYKTTPPVLDSDGSFFLYSKLTVDKSRWQQGNVFSCSVMHEALHNHYTQKSLSLSPGK

SEQ ID NO: 384 - protein, 482 aa, Artificial Sequence
  SEQ ID NO: 384 - scFv fragment  humanized SP34 VH3-VL55 - human IgG1 Fc fusion(S30F)
EVQLVESGGGLVQPGGSLRLSCAASGFTFNTYAMNWVRQAPGKGLEWVARIRSKYNNYATYYADSVKSRFTISRDDSKNTLYLQMNSLRAEDTAVYYCVRHGNFGNSYVSYFAYWGQGTTVTVSSGGGGSGGGGSGGGGSEIVVTQSPATLSVSPGERATLSCRSSTGAVTTFNYANWVQEKPGQAFRGLIGGANKRAPGVPARFSGSLSGDEATLTISSLQSEDFAVYYCALFYSNLWVFGQGTKLEIKGGGGTDKTHTCPPCPAPELLGGPSVFLFPPKPKDTLMISRTPEVTCVVVDVSHEDPEVKFNWYVDGVEVHNAKTKPREEQYNSTYRVVSVLTVLHQDWLNGKEYKCKVSNKALPAPIEKTISKAKGQPREPQVYTLPPSRDELTKNQVSLTCLVKGFYPSDIAVEWESNGQPENNYKTTPPVLDSDGSFFLYSKLTVDKSRWQQGNVFSCSVMHEALHNHYTQKSLSLSPGK

SEQ ID NO: 385 - protein, 482 aa, Artificial Sequence
  SEQ ID NO: 385 - scFv fragment  humanized SP34 VH5-VL56 - human IgG1 Fc fusion (L95G)
EVQLVESGGGLVQPGGSLRLSCAASGFTFNTYAMNWVRQAPGKGLEWVARIRSKYNNYATYYADSVKGRFTISRDDSKNTLYLQMNSLRAEDTAVYYCVRHGNFGNSYVSYFAYWGQGTTVTVSSGGGGSGGGGSGGGGSEIVVTQSPATLSVSPGERATLSCRSSTGAVTTSNYANWVQEKPGQAFRGLIGGANKRAPGVPARFSGSLSGDEATLTISSLQSEDFAVYYCALFYSNGWVFGQGTKLEIKGGGGTDKTHTCPPCPAPELLGGPSVFLFPPKPKDTLMISRTPEVTCVVVDVSHEDPEVKFNWYVDGVEVHNAKTKPREEQYNSTYRVVSVLTVLHQDWLNGKEYKCKVSNKALPAPIEKTISKAKGQPREPQVYTLPPSRDELTKNQVSLTCLVKGFYPSDIAVEWESNGQPENNYKTTPPVLDSDGSFFLYSKLTVDKSRWQQGNVFSCSVMHEALHNHYTQKSLSLSPGK

SEQ ID NO: 386 - protein, 482 aa, Artificial Sequence
  SEQ ID NO: 386 - scFv fragment  humanized SP34 VH5-VL57 - human IgG1 Fc fusion (L95S)
EVQLVESGGGLVQPGGSLRLSCAASGFTFNTYAMNWVRQAPGKGLEWVARIRSKYNNYATYYADSVKGRFTISRDDSKNTLYLQMNSLRAEDTAVYYCVRHGNFGNSYVSYFAYWGQGTTVTVSSGGGGSGGGGSGGGGSEIVVTQSPATLSVSPGERATLSCRSSTGAVTTSNYANWVQEKPGQAFRGLIGGANKRAPGVPARFSGSLSGDEATLTISSLQSEDFAVYYCALFYSNSWVFGQGTKLEIKGGGGTDKTHTCPPCPAPELLGGPSVFLFPPKPKDTLMISRTPEVTCVVVDVSHEDPEVKFNWYVDGVEVHNAKTKPREEQYNSTYRVVSVLTVLHQDWLNGKEYKCKVSNKALPAPIEKTISKAKGQPREPQVYTLPPSRDELTKNQVSLTCLVKGFYPSDIAVEWESNGQPENNYKTTPPVLDSDGSFFLYSKLTVDKSRWQQGNVFSCSVMHEALHNHYTQKSLSLSPGK

SEQ ID NO: 387 - protein, 482 aa, Artificial Sequence
  SEQ ID NO: 387 - scFv fragment  humanized SP34 VH5-VL58 - human IgG1 Fc fusion(L95T)
EVQLVESGGGLVQPGGSLRLSCAASGFTFNTYAMNWVRQAPGKGLEWVARIRSKYNNYATYYADSVKGRFTISRDDSKNTLYLQMNSLRAEDTAVYYCVRHGNFGNSYVSYFAYWGQGTTVTVSSGGGGSGGGGSGGGGSEIVVTQSPATLSVSPGERATLSCRSSTGAVTTSNYANWVQEKPGQAFRGLIGGANKRAPGVPARFSGSLSGDEATLTISSLQSEDFAVYYCALFYSNTWVFGQGTKLEIKGGGGTDKTHTCPPCPAPELLGGPSVFLFPPKPKDTLMISRTPEVTCVVVDVSHEDPEVKFNWYVDGVEVHNAKTKPREEQYNSTYRVVSVLTVLHQDWLNGKEYKCKVSNKALPAPIEKTISKAKGQPREPQVYTLPPSRDELTKNQVSLTCLVKGFYPSDIAVEWESNGQPENNYKTTPPVLDSDGSFFLYSKLTVDKSRWQQGNVFSCSVMHEALHNHYTQKSLSLSPGK

SEQ ID NO: 388 - protein, 482 aa, Artificial Sequence
  SEQ ID NO: 388 - scFv fragment  humanized SP34 VH5-VL59 - human IgG1 Fc fusion (L95D)
EVQLVESGGGLVQPGGSLRLSCAASGFTFNTYAMNWVRQAPGKGLEWVARIRSKYNNYATYYADSVKGRFTISRDDSKNTLYLQMNSLRAEDTAVYYCVRHGNFGNSYVSYFAYWGQGTTVTVSSGGGGSGGGGSGGGGSEIVVTQSPATLSVSPGERATLSCRSSTGAVTTSNYANWVQEKPGQAFRGLIGGANKRAPGVPARFSGSLSGDEATLTISSLQSEDFAVYYCALFYSNDWVFGQGTKLEIKGGGGTDKTHTCPPCPAPELLGGPSVFLFPPKPKDTLMISRTPEVTCVVVDVSHEDPEVKFNWYVDGVEVHNAKTKPREEQYNSTYRVVSVLTVLHQDWLNGKEYKCKVSNKALPAPIEKTISKAKGQPREPQVYTLPPSRDELTKNQVSLTCLVKGFYPSDIAVEWESNGQPENNYKTTPPVLDSDGSFFLYSKLTVDKSRWQQGNVFSCSVMHEALHNHYTQKSLSLSPGK

SEQ ID NO: 389 - protein, 482 aa, Artificial Sequence
  SEQ ID NO: 389 - scFv fragment  humanized SP34 VH5-VL60 - human IgG1 Fc fusion (L95N)
EVQLVESGGGLVQPGGSLRLSCAASGFTFNTYAMNWVRQAPGKGLEWVARIRSKYNNYATYYADSVKGRFTISRDDSKNTLYLQMNSLRAEDTAVYYCVRHGNFGNSYVSYFAYWGQGTTVTVSSGGGGSGGGGSGGGGSEIVVTQSPATLSVSPGERATLSCRSSTGAVTTSNYANWVQEKPGQAFRGLIGGANKRAPGVPARFSGSLSGDEATLTISSLQSEDFAVYYCALFYSNNWVFGQGTKLEIKGGGGTDKTHTCPPCPAPELLGGPSVFLFPPKPKDTLMISRTPEVTCVVVDVSHEDPEVKFNWYVDGVEVHNAKTKPREEQYNSTYRVVSVLTVLHQDWLNGKEYKCKVSNKALPAPIEKTISKAKGQPREPQVYTLPPSRDELTKNQVSLTCLVKGFYPSDIAVEWESNGQPENNYKTTPPVLDSDGSFFLYSKLTVDKSRWQQGNVFSCSVMHEALHNHYTQKSLSLSPGK

SEQ ID NO: 390 - protein, 481 aa, Artificial Sequence
  SEQ ID NO: 390 - BEAT antibody scFv heavy chain SP34(anti-CD3 epsilon arm - humanized SP34 VH5/VL61 BT11 LALA)
EVQLVESGGGLVQPGGSLRLSCAASGFTFNTYAMNWVRQAPGKGLEWVARIRSKYNNYATYYADSVKGRFTISRDDSKNTLYLQMNSLRAEDTAVYYCVRHGNFGNSYVSYFAYWGQGTTVTVSSGGGGSGGGGSGGGGSEIVVTQSPATLSVSPGERATLSCRSSTGAVTAANYANWVQEKPGQAFRGLIGGANKRAPGVPARFSGSLSGDEATLTISSLQSEDFAVYYCALFYSNAWVFGQGTKLEIKGGGGTDKTHTCPPCPAPEAAGGPSVFLFPPKPKDTLMISRTPEVTCVVVDVSHEDPEVKFNWYVDGVEVHNAKTKPREEQYNSTYRVVSVLTVLHQDWLNGKEYKCKVSNKALPAPIEKTISKAKGQPREPEVATFPPSRDELTKNQVTLVCLVTGFYPSDIAVEWESNGQPENNYKTDPPLLESQGSFALSSRLRVDKSRWQQGNVFSCSVMHEALHNHYTQKSLSLSPG

SEQ ID NO: 391 - protein, 481 aa, Artificial Sequence
  SEQ ID NO: 391 - BEAT antibody scFv heavy chain SP34(anti-CD3 epsilon arm - humanized SP34 VH5/VL62 BT11 LALA)
EVQLVESGGGLVQPGGSLRLSCAASGFTFNTYAMNWVRQAPGKGLEWVARIRSKYNNYATYYADSVKGRFTISRDDSKNTLYLQMNSLRAEDTAVYYCVRHGNFGNSYVSYFAYWGQGTTVTVSSGGGGSGGGGSGGGGSEIVVTQSPATLSVSPGERATLSCRSSTGAVTESNYANWVQEKPGQAFRGLIGGANKRAPGVPARFSGSLSGDEATLTISSLQSEDFAVYYCALFYSNAWVFGQGTKLEIKGGGGTDKTHTCPPCPAPEAAGGPSVFLFPPKPKDTLMISRTPEVTCVVVDVSHEDPEVKFNWYVDGVEVHNAKTKPREEQYNSTYRVVSVLTVLHQDWLNGKEYKCKVSNKALPAPIEKTISKAKGQPREPEVATFPPSRDELTKNQVTLVCLVTGFYPSDIAVEWESNGQPENNYKTDPPLLESQGSFALSSRLRVDKSRWQQGNVFSCSVMHEALHNHYTQKSLSLSPG

SEQ ID NO: 392 - protein, 481 aa, Artificial Sequence
  SEQ ID NO: 392 - BEAT antibody scFv heavy chain SP34(anti-CD3 epsilon arm - humanized SP34 VH5/VL63 BT11 LALA)
EVQLVESGGGLVQPGGSLRLSCAASGFTFNTYAMNWVRQAPGKGLEWVARIRSKYNNYATYYADSVKGRFTISRDDSKNTLYLQMNSLRAEDTAVYYCVRHGNFGNSYVSYFAYWGQGTTVTVSSGGGGSGGGGSGGGGSEIVVTQSPATLSVSPGERATLSCRSSTGAVTSSNYANWVQEKPGQAFRGLIGGANKRAPGVPARFSGSLSGDEATLTISSLQSEDFAVYYCALFYSNAWVFGQGTKLEIKGGGGTDKTHTCPPCPAPEAAGGPSVFLFPPKPKDTLMISRTPEVTCVVVDVSHEDPEVKFNWYVDGVEVHNAKTKPREEQYNSTYRVVSVLTVLHQDWLNGKEYKCKVSNKALPAPIEKTISKAKGQPREPEVATFPPSRDELTKNQVTLVCLVTGFYPSDIAVEWESNGQPENNYKTDPPLLESQGSFALSSRLRVDKSRWQQGNVFSCSVMHEALHNHYTQKSLSLSPG

SEQ ID NO: 393 - protein, 481 aa, Artificial Sequence
  SEQ ID NO: 393 - BEAT antibody scFv heavy chain SP34(anti-CD3 epsilon arm - humanized SP34 VH5/VL64 BT11 LALA)
EVQLVESGGGLVQPGGSLRLSCAASGFTFNTYAMNWVRQAPGKGLEWVARIRSKYNNYATYYADSVKGRFTISRDDSKNTLYLQMNSLRAEDTAVYYCVRHGNFGNSYVSYFAYWGQGTTVTVSSGGGGSGGGGSGGGGSEIVVTQSPATLSVSPGERATLSCRSSTGAVTESNYANWVQEKPGQAFRGLIGGANKRAPGVPARFSGSLSGDEATLTISSLQSEDFAVYYCALFYSNGWVFGQGTKLEIKGGGGTDKTHTCPPCPAPEAAGGPSVFLFPPKPKDTLMISRTPEVTCVVVDVSHEDPEVKFNWYVDGVEVHNAKTKPREEQYNSTYRVVSVLTVLHQDWLNGKEYKCKVSNKALPAPIEKTISKAKGQPREPEVATFPPSRDELTKNQVTLVCLVTGFYPSDIAVEWESNGQPENNYKTDPPLLESQGSFALSSRLRVDKSRWQQGNVFSCSVMHEALHNHYTQKSLSLSPG

SEQ ID NO: 394 - protein, 481 aa, Artificial Sequence
  SEQ ID NO: 394 - BEAT antibody scFv heavy chain SP34(anti-CD3 epsilon arm - humanized SP34 VH5/VL65 BT11 LALA)version 3
EVQLVESGGGLVQPGGSLRLSCAASGFTFNTYAMNWVRQAPGKGLEWVARIRSKYNNYATYYADSVKGRFTISRDDSKNTLYLQMNSLRAEDTAVYYCVRHGNFGNSYVSYFAYWGQGTTVTVSSGGGGSGGGGSGGGGSEIVVTQSPATLSVSPGERATLSCRSSTGAVTESNYANWVQEKPGQAFRGLIGGANKRAPGVPARFSGSLSGDEATLTISSLQSEDFAVYYCALFYSNTWVFGQGTKLEIKGGGGTDKTHTCPPCPAPEAAGGPSVFLFPPKPKDTLMISRTPEVTCVVVDVSHEDPEVKFNWYVDGVEVHNAKTKPREEQYNSTYRVVSVLTVLHQDWLNGKEYKCKVSNKALPAPIEKTISKAKGQPREPEVATFPPSRDELTKNQVTLVCLVTGFYPSDIAVEWESNGQPENNYKTDPPLLESQGSFALSSRLRVDKSRWQQGNVFSCSVMHEALHNHYTQKSLSLSPG

SEQ ID NO: 395 - protein, 481 aa, Artificial Sequence
  SEQ ID NO: 395 - BEAT antibody scFv heavy chain SP34(anti-CD3 epsilon arm - humanized SP34 VH5/VL66 BT11 LALA)
EVQLVESGGGLVQPGGSLRLSCAASGFTFNTYAMNWVRQAPGKGLEWVARIRSKYNNYATYYADSVKGRFTISRDDSKNTLYLQMNSLRAEDTAVYYCVRHGNFGNSYVSYFAYWGQGTTVTVSSGGGGSGGGGSGGGGSEIVVTQSPATLSVSPGERATLSCRSSTGAVTAANYANWVQEKPGQAFRGLIGGANKRAPGVPARFSGSLSGDEATLTISSLQSEDFAVYYCALFYSNGWVFGQGTKLEIKGGGGTDKTHTCPPCPAPEAAGGPSVFLFPPKPKDTLMISRTPEVTCVVVDVSHEDPEVKFNWYVDGVEVHNAKTKPREEQYNSTYRVVSVLTVLHQDWLNGKEYKCKVSNKALPAPIEKTISKAKGQPREPEVATFPPSRDELTKNQVTLVCLVTGFYPSDIAVEWESNGQPENNYKTDPPLLESQGSFALSSRLRVDKSRWQQGNVFSCSVMHEALHNHYTQKSLSLSPG

SEQ ID NO: 396 - protein, 481 aa, Artificial Sequence
  SEQ ID NO: 396 - BEAT antibody scFv heavy chain SP34(anti-CD3 epsilon arm - humanized SP34 VH5/VL67 BT11 LALA)version 4
EVQLVESGGGLVQPGGSLRLSCAASGFTFNTYAMNWVRQAPGKGLEWVARIRSKYNNYATYYADSVKGRFTISRDDSKNTLYLQMNSLRAEDTAVYYCVRHGNFGNSYVSYFAYWGQGTTVTVSSGGGGSGGGGSGGGGSEIVVTQSPATLSVSPGERATLSCRSSTGAVTAANYANWVQEKPGQAFRGLIGGANKRAPGVPARFSGSLSGDEATLTISSLQSEDFAVYYCALFYSNTWVFGQGTKLEIKGGGGTDKTHTCPPCPAPEAAGGPSVFLFPPKPKDTLMISRTPEVTCVVVDVSHEDPEVKFNWYVDGVEVHNAKTKPREEQYNSTYRVVSVLTVLHQDWLNGKEYKCKVSNKALPAPIEKTISKAKGQPREPEVATFPPSRDELTKNQVTLVCLVTGFYPSDIAVEWESNGQPENNYKTDPPLLESQGSFALSSRLRVDKSRWQQGNVFSCSVMHEALHNHYTQKSLSLSPG

SEQ ID NO: 397 - protein, 481 aa, Artificial Sequence
  SEQ ID NO: 397 - BEAT antibody scFv heavy chain SP34(anti-CD3 epsilon arm - humanized SP34 VH5/VL68 BT11 LALA)
EVQLVESGGGLVQPGGSLRLSCAASGFTFNTYAMNWVRQAPGKGLEWVARIRSKYNNYATYYADSVKGRFTISRDDSKNTLYLQMNSLRAEDTAVYYCVRHGNFGNSYVSYFAYWGQGTTVTVSSGGGGSGGGGSGGGGSEIVVTQSPATLSVSPGERATLSCRSSTGAVTEANYANWVQEKPGQAFRGLIGGANKRAPGVPARFSGSLSGDEATLTISSLQSEDFAVYYCALFYSNTWVFGQGTKLEIKGGGGTDKTHTCPPCPAPEAAGGPSVFLFPPKPKDTLMISRTPEVTCVVVDVSHEDPEVKFNWYVDGVEVHNAKTKPREEQYNSTYRVVSVLTVLHQDWLNGKEYKCKVSNKALPAPIEKTISKAKGQPREPEVATFPPSRDELTKNQVTLVCLVTGFYPSDIAVEWESNGQPENNYKTDPPLLESQGSFALSSRLRVDKSRWQQGNVFSCSVMHEALHNHYTQKSLSLSPG

SEQ ID NO: 398 - protein, 481 aa, Artificial Sequence
  SEQ ID NO: 398 - BEAT antibody scFv heavy chain SP34(anti-CD3 epsilon arm - humanized SP34 VH5/VL69 BT11 LALA)
EVQLVESGGGLVQPGGSLRLSCAASGFTFNTYAMNWVRQAPGKGLEWVARIRSKYNNYATYYADSVKGRFTISRDDSKNTLYLQMNSLRAEDTAVYYCVRHGNFGNSYVSYFAYWGQGTTVTVSSGGGGSGGGGSGGGGSEIVVTQSPATLSVSPGERATLSCRSSTGAVTEDNYANWVQEKPGQAFRGLIGGANKRAPGVPARFSGSLSGDEATLTISSLQSEDFAVYYCALFYSNTWVFGQGTKLEIKGGGGTDKTHTCPPCPAPEAAGGPSVFLFPPKPKDTLMISRTPEVTCVVVDVSHEDPEVKFNWYVDGVEVHNAKTKPREEQYNSTYRVVSVLTVLHQDWLNGKEYKCKVSNKALPAPIEKTISKAKGQPREPEVATFPPSRDELTKNQVTLVCLVTGFYPSDIAVEWESNGQPENNYKTDPPLLESQGSFALSSRLRVDKSRWQQGNVFSCSVMHEALHNHYTQKSLSLSPG

SEQ ID NO: 399 - protein, 217 aa, Artificial Sequence
  SEQ ID NO: 399 SP34 humanized light chain with VL65 domain
EIVVTQSPATLSVSPGERATLSCRSSTGAVTESNYANWVQEKPGQAFRGLIGGANKRAPGVPARFSGSLSGDEATLTISSLQSEDFAVYYCALFYSNTWVFGQGTKLEIKRTVAAPSVFIFPPSDEQLKSGTASVVCLLNNFYPREAKVQWKVDNALQSGNSQESVTEQDSKDSTYSLSSTLTLSKADYEKHKVYACEVTHQGLSSPVTKSFNRGEC

SEQ ID NO: 400 - protein, 216 aa, Artificial Sequence
  SEQ ID NO: 400 - SP34 humanized light chain with VL67 domain
EIVVTQSPATLSVSPGERATLSCRSSTGAVTAANYANWVQEKPGQAFRGLIGGANKRAPGVPARFSGSLSGDEATLTISSLQSEDFAVYYCALFYSNTWVFGQGTKLEIKTVAAPSVFIFPPSDEQLKSGTASVVCLLNNFYPREAKVQWKVDNALQSGNSQESVTEQDSKDSTYSLSSTLTLSKADYEKHKVYACEVTHQGLSSPVTKSFNRGEC

SEQ ID NO: 401 - protein, 110 aa, Artificial Sequence
  SEQ ID NO: 401 - SP34 humanized VL65 domain
EIVVTQSPATLSVSPGERATLSCRSSTGAVTESNYANWVQEKPGQAFRGLIGGANKRAPGVPARFSGSLSGDEATLTISSLQSEDFAVYYCALFYSNTWVFGQGTKLEIK

SEQ ID NO: 402 - protein, 110 aa, Artificial Sequence
  SEQ ID NO: 402 - SP34 humanized VL67 domain
EIVVTQSPATLSVSPGERATLSCRSSTGAVTAANYANWVQEKPGQAFRGLIGGANKRAPGVPARFSGSLSGDEATLTISSLQSEDFAVYYCALFYSNTWVFGQGTKLEIK

SEQ ID NO: 403 - protein, 481 aa, Artificial Sequence
  SEQ ID NO: 403 - scFv fragment  mouse SP34 human IgG1 Fc fusion
EVQLVESGGGLVQPKGSLKLSCAASGFTFNTYAMNWVRQAPGKGLEWVARIRSKYNNYATYYADSVKDRFTISRDDSQSILYLQMNNLKTEDTAMYYCVRHGNFGNSYVSWFAYWGQGTLVTVSAGGGGSGGGGSGGGGSQAVVTQESALTTSPGETVTLTCRSSTGAVTTSNYANWVQEKPDHLFTGLIGGTNKRAPGVPARFSGSLIGDKAALTITGAQTEDEAIYFCALWYSNLWVFGGGTKLTVLGGGGTDKTHTCPPCPAPELLGGPSVFLFPPKPKDTLMISRTPEVTCVVVDVSHEDPEVKFNWYVDGVEVHNAKTKPREEQYNSTYRVVSVLTVLHQDWLNGKEYKCKVSNKALPAPIEKTISKAKGQPREPQVYTLPPSRDELTKNQVSLTCLVKGFYPSDIAVEWESNGQPENNYKTTPPVLDSDGSFFLYSKLTVDKSRWQQGNVFSCSVMHEALHNHYTQKSLSLSPGK

1. An immunoglobulin or a fragment thereof comprising an epitope binding region which binds to human CD3 and comprises a heavy chain variable domain sequence selected from the group consisting of: SEQ ID NO: 101, SEQ ID NO: 102, SEQ ID NO: 103, and SEQ ID NO: 104 and a light chain variable domain sequence selected from the group consisting of: SEQ ID NO: 105, SEQ ID NO: 106, SEQ ID NO: 401, and SEQ ID NO: 402.

2. The immunoglobulin or fragment thereof of claim 1, wherein the epitope binding region comprises a heavy chain variable domain sequence and a light chain variable domain sequence pair selected from the group consisting of: SEQ ID NO: 101 and SEQ ID NO: 105, SEQ ID NO: 104 and SEQ ID NO: 106, SEQ ID NO: 104 and SEQ ID NO: 401, and SEQ ID NO: 104 and SEQ ID NO: 402.

3. An immunoglobulin or fragment thereof comprising an epitope binding region which binds to human CD3 and comprises a heavy chain sequence and a light chain sequence pair selected from the group consisting of: SEQ ID NO: 359 and SEQ ID NO: 399 and SEQ ID NO 359 and SEQ ID NO: 400.

4. The immunoglobulin or fragment thereof of claim 1, wherein said immunoglobulin or fragment thereof is a hetero-dimeric immunoglobulin or fragment thereof, wherein the hetero-dimeric immunoglobulin or fragment thereof comprises a first polypeptide and, a second polypeptide.

5. A The hetero-dimeric immunoglobulin or a fragment thereof of claim 4, wherein the epitope binding region of the second binds to a different epitope than the epitope binding region of the first polypeptide.

6. The hetero-dimeric immunoglobulin or a fragment thereof of claim 5, wherein the epitope binding region of the first polypeptide is a FAB and the epitope binding region of the second polypeptide is a scFv or wherein the epitope binding region of the first polypeptide is a scFv and the epitope binding region of the second polypeptide is a FAB.

7. The hetero-dimeric immunoglobulin or fragment thereof of claim 6, wherein the scFv binds to human CD3 and comprises a sequence selected from the group consisting of: SEQ ID NO: 361, SEQ ID NO: 311, SEQ ID NO: 394, and SEQ ID NO: 396.

8. The hetero-dimeric immunoglobulin or fragment thereof of claim 6, wherein the scFv has at least a twofold improvement in expression in comparison to a SP34 chimera formatted as a scFv-Fc, wherein the SP34 chimera comprises the heavy chain variable domain and the light chain variable domain sequences of SEQ ID NOs: 60 and 61, respectively.

9. The hetero-dimeric immunoglobulin or fragment thereof of claim 6, wherein the scFv binds to human CD3 and has at least a twofold improvement in expression in comparison to a SP34 chimera formatted as an scFv, wherein the SP34 chimera comprises the heavy chain variable domain and light chain variable domain sequences of SEQ ID NOs: 60 and 61, and wherein the human CD3 binding scFv is expressed in a bispecific antibody comprising a FAB arm.

10. The hetero-dimeric immunoglobulin or a fragment thereof of claim 4, wherein the hetero-dimeric immunoglobulin or a fragment thereof has greater thermostability in comparison a hetero-dimeric immunoglobulin or fragment thereof comprising the heavy chain variable domain and light chain variable domain sequences of SEQ ID NOs: 60 and 61.

11. An in vitro method for the production of a hetero-dimeric immunoglobulin or fragment thereof of claim 4, comprising the following steps:
(i)(a) preparing a DNA vector encoding a heavy chain of the first polypeptide and a DNA vector encoding a heavy chain of the second polypeptide wherein one or both DNA vectors or a third DNA vector optionally encode a common light chain or a light chain that assembles with a heavy chain of the first or second polypeptide; or
(i)(b) preparing one DNA vector encoding heavy chains of the first and second polypeptides wherein the DNA vector optionally encodes a common light chain or a light chain that assembles with a heavy chain, of the first or second polypeptide; and wherein said DNA vectors are suitable for transient or stable expression in a mammalian host cell;
(ii) transfecting or co-transfecting the DNA vector(s) from (i) a mammalian host cell line;
(iii) culturing the transfected cell line or stably selected clone therefrom and harvesting the cell culture supernatant;
(iv) contacting the cell culture supernatant on a Protein A affinity chromatography resin; and
(v) eluting and collecting the hetero-dimeric immunoglobulin of fragment thereof of interest.

12. The method of claim 11, wherein the hetero-dimeric immunoglobulin or fragment thereof found in the purified material from step (v) is at least 95% pure.

13. The method of claim 12, wherein the hetero-dimeric immunoglobulin or fragment thereof found in the purified material from step (v) is at least 96% pure.

14. The method of claim 13, wherein the hetero-dimeric immunoglobulin or fragment thereof found in the purified material from step (v) is at least 97% pure.

15. The method of claim 11, wherein purity of the hetero-dimeric immunoglobulin or fragment thereof found in the purified material can be measured by capillary electrophoresis.
